(19) United States
(12) Patent Application Publication
(10) Pub. No.: US 2003/0078374 A1
(43) Pub. Date: Apr. 24, 2003

(54) Complementary peptide ligands generated from the human genome

(76) Inventors: Gareth W. Roberts, Cambridge (GB); Jonathan R. Heal, Highbury (GB)

Correspondence Address: FINNEGAN, HENDERSON, FARABOW, GARRETT &, DUNNER LLP, 1300 I STREET, NW, WASHINGTON, DC, 20006, US

(21) Appl. No.: 09/572,404

(22) Filed: May 17, 2000

(30) Foreign Application Priority Data
Dec. 13, 1999 (GB) 9929464.7

(51) Int. Cl. G06F 19/00; G01N 33/48; G01N 33/50; C07H 21/04

(52) U.S. Cl. 530/350; 536/23.2; 702/19

(57) ABSTRACT

In the current invention the application of our novel informatics approach to the databases containing nucleotide and peptide sequences from the human genome generates the sequence of many peptides which form the basis of an innovative and novel approach to developing new therapeutic agents.

This invention claims the use of specific complementary peptides to the proteins encoded in the human genome as reagents and drugs for drug discovery programmes.

[0001] Specific protein interactions are critical events in most biological processes in health and disease. A clear idea of the way proteins interact, their three dimensional structure and the types of molecules which might block or enhance interaction are critical aspects of the science of drug discovery in the pharmaceutical industry.

[0002] Current predictions estimate that the human genome will be sequenced by 2002 if not sooner. This has accelerated the requirement for informatics tools for mining of the genomic sequence data. A process for the searching and analysis of protein and nucleotide sequence databases has been identified. Significant utility can be acheived within the pharmaceutical i industry by searching and analysing protein and nucleotide sequence databases to identify complementary peptides that interact with their relevant target proteins.

[0003] These novel peptides can be used as lead ligands to facilitate drug design and development. This invention describes the application of this process to the databases containing nucleotide and protein sequence data from the human genome.

[0004] This invention claims the use of specific complementary peptides to the proteins encoded in the human genome as reagents and drugs for drug discovery programmes.

### BACKGROUND

[0005] Specific protein interactions are critical events in most biological processes and a clear idea of the way proteins interact, their three dimensional structure and the types of molecules which might block or enhance interaction are critical aspects of the science of drug discovery in the pharmaceutical industry.

[0006] Proteins are made up of strings of amino acids and each amino acid in a string is coded for by a triplet of nucleotides present in DNA sequences (Stryer 1997). The linear sequence of DNA code is read and translated by a cell's synthetic machinery to produce a linear sequence of amino acids that then fold to form a complex three-dimensional protein.

[0007] In general it is held that the primary structure of a protein determines its tertiary structure. A large volume of work supports this view and many sources of software are available to the scientists in order to produce models of protein structures (Sansom 1998). In addition, a considerable effort is underway in order to build on this principle and generate a definitive database demonstrating the relationships between primary and tertiary protein structures. This endeavour is likened to the human genome project and is estimated to have a similar cost (Gaasterland 1998).

[0008] The binding of large proteinaceous signaling molecules (such as hormones) to cellular receptors regulates a substantial portion of the control of cellular processes and functions. These protein-protein interactions are distinct from the interaction of substrates to enzymes or small molecule ligands to seven-transmembrane receptors. Protein-protein interactions occur over relatively large surface areas, as opposed to the interactions of small molecule ligands with serpentine receptors, or enzymes with their substrates, which usually occur in focused “pockets” or “clefts”. Thus, protein-protein targets are non-traditional and the pharmaceutical community has had very limited success in developing drugs that bind to them using currently available approaches to lead discovery. High throughput screening technologies in which large (combinatorial) libraries of synthetic compounds are screened against a target protein(s) have failed to produce a significant number of lead compounds.

[0009] Many major diseases result from the inactivity or hyperactivity of large protein signaling molecules. For example, diabetes mellitus results from the absence or ineffectiveness of insulin, and dwarfism from the lack of growth hormone. Thus, simple replacement therapy with recombinant forms of insulin or growth hormone heralded the beginnings of the biotechnology industry. However, nearly all drugs that target protein-protein interactions or that mimic large protein signaling molecules are also large proteins. Protein drugs are expensive to manufacture, difficult to formulate, and must be given by injection or topical administration.

[0010] It is generally believed that because the binding interfaces between proteins are very large, traditional approaches to drug screening or design have not been successful. In fact, for most protein-protein interactions, only small subsets of the overall intermolecular surfaces are important in defining binding affinity.

[0011] “One strongly suspects that the many crevices, canyons, depressions and gaps, that punctuate any protein surface are places that interact with numerous micro- and macro-molecular ligands inside the cell or in the extra-cellular spaces, the identity of which is not known” (Goldstein 1998).

[0012] Despite these complexities, recent evidence suggests that protein-protein interfaces are tractable targets for drug design when coupled with suitable functional analysis and more robust molecular diversity methods. For example, the interface between hGH and its receptor buries ˜1300 Sq. Angstroms of surface area and involves 30 contact side chains across the interface. However, alanine-scanning mutagenesis shows that only eight side-chains at the center of the interface (covering an area of about 350 Sq. Angstroms) are crucial for affinity. Such “hot spots” have been found in numerous other protein-protein complexes by alanine-scanning, and their existence is likely to be a general phenomenon.

[0013] The problem is therefore to define the small subset of regions that define the binding or functionality of the protein.

[0014] The important commercial reason for this is that a more efficient way of doing this would greatly accelerate the process of drug development.

[0015] These complexities are not insoluble problems and newer theoretical methods should not be ignored in the drug design process. Nonetheless, in the near future there are no good algorithms that allow one to predict protein binding affinities quickly, reliably, and with high precision (Sunesis website www.sunesis.com Sep. 17, 1999).

[0016] A process for the analysis of whole genome databases has been developed. Significant utility can be achieved within the pharmaceutical industry by searching and analyzing protein and nucleotide sequence databases to identify complementary peptides which interact with their relevant target proteins.

[0017] These novel peptides can be used as lead ligands to facilitate drug design and development. This invention describes the application of this process to databases containing nucleotide and protein sequence data from the human genome.

[0018] The process has been described in patent application number GB 9927485.4, filed Nov. 19, 1999 for use in analysing, and manipulating the sequence data (both DNA and protein) found in large databases and its utility in conducting systematic searches to identify the sequences which code for the key intermolecular surfaces or “hot spots” on specific protein targets.

[0019] This technology will have significant applications in the application of informatics to sequence databases in order to identify lead molecules for numerous important pharmaceutical targets.

### THE INVENTION

[0020] In the current invention the application of our novel informatics approach to the databases containing nucleotide and peptide sequences from the human genome generates the sequence of many peptides which form the basis of an innovative and novel approach to developing new therapeutic agents.

[0021] This invention claims the use of specific complementary peptides to the proteins encoded in the human genome as reagents and drugs for drug discovery programmes.

### APPLICATION OF THE DATA MINING PROCESS TO THE ANALYSIS OF THE HUMAN GENOME

[0022] One of the key aims of the Human Genome Project is to identify all of the 80,000 to 140,000 genes in human DNA and to determine the complete sequence of the genome (3 billion bases). The first working draft of the human genome sequence (90% coverage) is likely to be completed by 2000 with the finished sequence being completed by 2002. The public availability of this sequence has provided a resource that can now be mined using novel informatics technologies.

[0023] Most human genes are expressed as multiple distinct proteins. It has been estimated that the number of actual proteins generated by the human genome is at least ten times greater. The data mining process described, patent application number GB 9927485.4 greatly accelerates the pace of identification and optimization of small peptides that bind to protein-protein targets. This provides a means of reducing the complexity of the human genetic information by identifying those regions of proteins that are likely to be important targets for drug development. In addition, the computational methods identify proteins that are functionally linked through different pathways or structural complexes.

[0024] We have applied our computational approach with its novel algorithms for generating complementary peptides, patent application number GB 9927485.4, to the human genome. Human nucleotide and protein sequence data is publicly available in a number of large databases (see EXAMPLE 1), and these are continually updated as more sequence becomes available. The identification of novel complementary peptides will allow new lead ligands to enhance drug design and discovery.

[0025] The biological relevance of this approach is described (EXAMPLE 2) and the utility of peptides as tools for functional genomics studies is outlined in EXAMPLE 3.

[0026] A catalogue of complementary inter-molecular peptides frame size 10 (average 3 per gene) was generated for each gene within the human genome (see EXAMPLE 4).

[0027] Sets of shorter ‘daughter’ sequences of frame size 5, 6, 7, 8 or 9 can also be derived from these sequences (EXAMPLE 5).

[0028] A further set of intra-molecular complementary peptide sequences was also generated for each gene within the human genome (see EXAMPLE 6).

[0029] Sets of shorter ‘daughter’ sequences of frame size 5, 6, 7, 8 or 9 can also be derived from these sequences (EXAMPLE 7).

[0030] Each complementary peptide sequence has a unique identifying number in the catalog and peptides are categorised as either intra-molecular or inter-molecular peptides within the human genome as shown in the table below (and in EXAMPLES 4 and 6):

| Genome | Inter-molecular peptides | Intra-molecular peptides |
|---|---|---|
| Human | 1-3622 | 3624-4203 |

[0031] Utilizing our novel approach we were able to discover the sequences of complementary peptides that have the potential to interact with and alter the functionality of the relevant protein coded for by its gene. Furthermore the second analysis provides information as to the regions on other proteins which might interact with the first protein (its ‘molecular partners’ in physiological functions).

[0032] The peptide sequences described in this patent can be readily made into peptides by a multitude of methods. The peptides made from the sequences described in this patent will have considerable utility as tools for functional genomics studies, reagents for the configuration of high-throughput screens, a starting point for medicinal chemistry manipulation, peptide mimetics, and therapeutic agents in their own right.

[0033] The process of patent application number GB9927485.4 will now be described below. The examples of this present application are the result of applying that process to a selected human database: it will readily be appreciated that use of the process on other databases will yield peptide sequences and catalogues of intra- and inter-molecular complementary peptides specific to the other human databases (e.g. the databases in EXAMPLE 1).

[0034] The current problems associated with design of complementary peptides are:

[0035] A lack of understanding of the forces of recognition between complementary peptides

[0036] An absence of software tools to facilitate searching and selecting complementary peptide pairs from within a protein database

[0037] A lack of understanding of statistical relevance/distribution of naturally encoded complementary peptides and how this corresponds to functional relevance.

[0038] Based on these shortfalls, our process provides the following technological advances in this field:

[0039] A mini library approach to define forces of recognition between human Interleukin (IL) 1β and its complementary peptides.

[0040] A high throughput computer system to analyse an entire database for intra/inter-molecular complementary regions.

[0041] Studies into preferred complementary peptide pairings between IL-1β and its complementary ligand reveal the importance of both the genetic code and complementary hydropathy for recognition. Specifically, for our example, the genetic code for a region of protein codes for the complementary peptide with the highest affinity. An important observation is that this complementary peptide maps spatially and by residue hydropathic character to the interacting portion of the IL-1R receptor, as elucidated by the X-ray crystal structure Brookhaven reference pdb2itb.ent.

[0042] Using these novel observations as guiding principles for analysis, we have developed a computational analysis system to evaluate the statistical and functional relevance of intra/inter-molecular complementary sequences.

[0043] This process provides significant benefits for those interested in:

[0044] The analysis and acquisition of peptide sequences to be used in the understanding of protein-protein interactions.

[0045] The development of peptides or small molecules which could be used to manipulate these interactions.

[0046] The advantages of this process to previous work in this field include:

[0047] Using a valid statistical model. Previously, complementary mappings within protein structures has been statistically validated by assuming that the occurrence of individual amino acids is equally weighted at 1/20 (Baranyi, 1995). Our statistical model takes into account the natural occurrence of amino acids and thus generates probabilities dependent on sequence rather than content per se.

[0048] Facilitation of batch searching of an entire database. Previously, investigations into the significance of naturally encoded complementary related sequences have been limited to small sample sizes with non-automated methods. The invention allows for analysis of an entire database at a time, overcoming the sampling problem, and providing for the first time an overview or ‘map’ of complementary peptide sequences within known protein sequences.

[0049] The ability to map complementary sequences as a function of frame size and percentage antisense amino acid content. Previously, no consideration has been given to the significance of the frame length of complementary sequences. Our process produces a statistical map as a function of frame size and percentage complementary residue content such that the statistical importance of how nature selects these frames may be evaluated.

### BRIEF DESCRIPTION OF DRAWINGS

[0050] The process is described with reference to accompanying drawings. In the drawings, like reference numbers indicate identical or functionally similar elements.

[0051] FIG. (1) shows a block diagram illustrating one embodiment of a method of the present invention

[0052] FIG. (2) shows a block diagram illustrating one embodiment for carrying out Step 4 in FIG. (1)

[0053] FIG. (3) shows a block diagram illustrating one embodiment for carrying out Step 5 in FIG. (1)

[0054] FIG. (4) shows a block diagram illustrating one embodiment for carrying out Step 8 in FIGS. (2) and (3)

[0055] FIG. (5) shows a block diagram illustrating one embodiment for carrying out Step 8 in FIGS. (2) and (3)

[0056] FIG. (6) shows a block diagram illustrating one embodiment for carrying out Step 6 in FIG. (1)

### A DESCRIPTION OF THE ANALYTICAL PROCESS

[0057] The software, ALS (antisense ligand searcher), performs the following tasks:

[0058] Given the input of two amino acid sequences, calculates the position, number and probability of the existence of intra- (within a protein) and inter- (between proteins) molecular antisense regions. ‘Antisense’ refers to relationships between amino acids specified in EXAMPLES 8 and 9 (both 5′->3′ derived and 3′->5′ derived coding schemes).

[0059] Allows sequences to be inputted manually through a suitable user interface (UI) and also through a connection to a database such that automated, or batch, processing can be facilitated.

[0060] Provides a suitable database to store results and an appropriate interface to allow manipulation of this data.

[0061] Allows generation of random sequences to function as experimental controls.

[0062] Diagrams describing the algorithms involved in this software are shown in FIGS. 1-5.

### DETAILED DESCRIPTION

[0063] 1. Overview

[0064] The present process is directed toward a computer-based process, a computer-based system and/or a computer program product for analysing antisense relationships between protein or DNA sequences. The method of the embodiment provides a tool for the analysis of protein or i DNA sequences for antisense relationships. This embodiment covers analysis of DNA or protein sequences for intramolecular (within the same sequence) antisense relationships or inter-molecular (between 2 different sequences) antisense relationships. This principle applies whether the sequence contains amino acid information (protein) or DNA information, since the former may be derived from the latter.

[0065] The overall process is to facilitate the batch analysis of an entire genome (collection of genes/and or protein sequences) for every possible antisense relationship of both inter- and intra-molecular nature. For the purpose of example it will be described here how a protein sequence database may be analysed by the methods described.

[0066] The program runs in two modes. The first mode (Intermolecular) is to select the first protein sequence in the databases and then analyse the antisense relationships between this sequence and all other protein sequences, one at a time. The program then selects the second sequence and repeats this process. This continues until all of the possible relationships have been analysed. The second mode (Intramolecular) is where each protein sequence is analysed for antisense relationships within the same protein and thus each sequence is loaded from the database and analysed in turn for these properties. Both operational modes use the same core algorithms for their processes. The core algorithms are described in detail below.

[0067] An example of the output from this process is a list of proteins in the database that contain highly improbable numbers of intramolecular antisense frames of size 10 (frame size is a section of the main sequence, it is described in more detail below).

[0068] 2. Method

[0069] For the purpose of example protein sequence 1 is ATRGRDSRDERSDERTD and protein sequence 2 is GTFRTSREDSTYSGDTDFDE (universal 1 letter amino acid codes used).

[0070] In step 1 (see FIG. 1), a protein sequence, sequence 1, is loaded. The protein sequence consists of an array of universally recognised amino acid one letter codes, e.g. ‘ADTRGSRD’. The source of this sequence can be a database, or any other file type. Step 2, is the same operation as for step 1, except sequence 2 is loaded. Decision step 3 involves comparing the two sequences and determining whether they are identical, or whether they differ. If they differ, processing continues to step 4, described in FIG. 2, otherwise processing continues to step 5, described in FIG. 3.

[0071] Step 6 analyses the data resulting from either step 4, or step 5, and involves an algorithm described in FIG. 6.

[0072] Description of parameters used in FIG. 2

| Name | Description |
|---|---|
| N | Framesize—the number of amino acids that make up each ‘frame’ |
| X | Score threshold—the number of amino acids that have to fulfil the |
| | antisense criteria within a given frame for that frame to be stored |
| | for analysis |
| Y | Score of individual antisense comparison (either 1 or 0) |
| IS | Running score for frame—(sum of y for frame) |
| ip1 | Position marker for Sequence 1—used to track location of selected |
| | frame for sequence 1 |
| ip2 | Position marker for Sequence 2—used to track location of selected |
| | frame for sequence 1 |
| F | Current position in frame |

[0073] In Step 7, a ‘frame’ is selected for each of the proteins selected in steps 1 and 2. A ‘frame’ is a specific section of a protein sequence. For example, for sequence 1, the first frame of length ‘5’ would correspond to the characters ‘ATRGR’. The user of the program decides the frame length as. an input value. This value corresponds to parameter ‘n’ in FIG. 2. A frame is selected from each of the protein sequences (sequence 1 and sequence 2). Each pair of frames that are selected are aligned and frame position parameter f is set to zero. The first pair of amino acids are ‘compared’ using the algorithm shown in FIG. 4/FIG. 5. The score output from this algorithm (y, either one or zero) is added to a aggregate score for the frame iS. In decision step 9 it is determined whether the aggregate score iS is greater than the Score threshold value (x). If it is then the frame is stored for further analysis. If it is not then decision step 10 is implemented. In decision step 10, it is determined whether it is possible for the frame to yield the score threshold (x). If it can, the frame processing continues and f is incremented such that the next pair of amino acids are compared. If it cannot, the loop exits and the next frame is selected. The position that the frame is selected from the protein sequences is determined by the parameter ip1 for sequence 1 and ip2 for sequence 2 (refer to FIG. 2). Each time steps 7 to 10 or 7 to 11 are completed, the value of ip1 is zeroed and then incremented until all frames of sequence 1 have been analysed against the chosen frame of sequence 2. When this is done, ip2 is then incremented and the value of ip1 is incremented until all frames of sequence 1 have been analysed against the chosen frame of sequence 2. This process repeats and terminates when ip2 is equal to the length of sequence 2. Once this process is complete, sequence 1 is reversed programmatically and the same analysis as described above is repeated. The overall effect of repeating steps 7 to 11 using each possible frame from both sequences is to facilitate step 8, the antisense scoring matrix for each possible combination of linear sequences at a given frame length.

[0074] FIG. 3 shows a block diagram of the algorithmic process that is carried out in the conditions described in FIG. 1. Step 12 is the only difference between the algorithms FIG. 2 and FIG. 3. In step 12, the value of ip2 (the position of the frame in sequence 2) is set to at least the value of ip1 at all times since as sequence 1 and sequence 2 are identical, if ip2 is less than ip1 then the same sequences are being searched twice.

[0075] FIGS. 4 and 5 describe the process in which a pair of amino acids (FIG. 4) or a pair of triplet codons are assessed for an antisense relationship. The antisense relationships are listed in EXAMPLES 8 and 9. In step 13, the currently selected amino acid from the current frame of sequence 1 and the currently selected amino acid from the current frame of sequence 2 (determined by parameter ‘f’ in FIGS. 2/3) are selected. For example, the first amino acid from the first frame of sequence 1 would be ‘A’ and the first amino acid from the first frame of sequence 2 i would be ‘G’. In step 14, the ASCII character codes for the selected single uppercase characters are determined and multiplied and, in step 15, the product compared with a list of precalculated scores, which represent the antisense relationships in EXAMPLES 8 and 9. If the amino acids are deemed to fulfil the criteria for an antisense relationship (the product matches a value in the precalculated list) then an output parameter ‘T’ is set to 1, otherwise the output parameter is set to zero.

[0076] Steps 16-21 relate to the case where the input sequences are DNA/RNA code rather the protein sequence. For example sequence 1 could be AAATTTAGCATG and sequence 2 could be TTTAAAGCATGC. The domain of the current invention includes both of these types of information as input values, since the protein sequence can be decoded from the DNA sequence, in accordance with the genetic code. Steps 16-21 determine antisense relationships for a given triplet codon. In step 16, the currently selected triplet codon for both sequences is ‘read’. For example, for sequence I the first triplet codon of the first frame would be ‘AAA’, and for sequence 2 this would be ‘TTT’. In step 17, the second character of each of these strings is selected. in step 18, the ASCII codes are multiplied and compared, in decision step 19, to a list to find out if the bases selected are ‘complementary’, in accordance with the rules of the genetic code. If they are, the first bases are compared in step 20, and subsequently the third bases are compared in step 21. Step 18 then determines whether the bases are ‘complementary’ or not. If the comparison yields a ‘non-complementary’ value at any step the routine terminates and the output score ‘T’ is set to zero. Otherwise the triplet codons are complementary and the output score T=1.

[0077] FIG. 6 illustrates the process of rationalising the results after the comparison of 2 protein or 2 DNA sequences. In step 22, the first ‘result’ is selected. A result consists of information on a pair of frames that were deemed ‘antisense’ in FIG. 2 or 3. This information includes location, length, score (i.e. the sum of scores for a frame) and frame type (forward or reverse, depending on orientation of sequences with respect to one another). In step 23, the frame size, the score values and the length of the parent sequence are then used to calculate the probability of that frame existing. The statistics, which govern the probability of any frame existing, are described in the next section and refer to equations 1-4. If the probability is less than a user chosen value ‘p’, then the frame details are ‘stored’ for inclusion in the final result set (step 24).

### Statistical Basis of Program Operation

[0078] The number of complementary frames in a protein sequence can be predicted from appropriate use of statistical theory.

[0079] The probability of any one residue fitting the criteria for a complementary relationship with any other is defined by the groupings illustrated in EXAMPLE 8. Thus, depending on the residue in question, there are varying probabilities for the selection of a complementary amino acid. This is a result of an uneven distribution of possible partners. For example possible complementary partners for a tryptophan residue include only proline whilst glycine, serine, cysteine and arginine all fulfil the criteria as complementary partners for threonine. The probabilities for these residues aligning with a complementary match are thus 0.05 and 0.2 respectively. The first problem in fitting an accurate equation to describe the expected number of complementary frames within any sequence is integrating these uneven probabilities into the model. One solution is to use an average value of the relative abundance of the different amino acids in natural sequences. This is calculated by equation 1

v=ΣR*N 1

[0080] Where v=probability sum, R=fractional abundance of amino acid in e. coli proteins, N=number of complementary partners specified by genetic code.

[0081] This value (p) is calculated as 2.98. The average probability (p) of selecting a complementary amino acid is thus 2.98/20=0.149.

[0082] For a single ‘frame’ of size (n) the probability (C) of pairing a number of complementary amino acids (r) can be described by the binomial distribution (equation 2)

$$C = \frac{n !}{( n - r ) ! r !} {{p}^{r} ( 1 - p )}^{n - r} \qquad 2$$

[0083] With this information we can predict that the expected number (Ex) of complementary frames in a protein to be:

$$Ex = 2 {( S - n )}^{2} \frac{n !}{( n - r ) ! r !} {{p}^{r} ( 1 - p )}^{n - r} \qquad 3$$

[0084] Where S=protein length, n=frame size, r=number of complementary residues required for a frame and p=0.149. If r=n, representing that all amino acids in a frame have to fulfil a complementary relationship, the above equation simplifies to:

Ex=2(S−n)²pⁿ 4

[0085] For a population of randomly assembled amino acid chains of a predetermined length we would expect the number of frames fulfilling the complementary criteria in the search algorithm to vary in accordance with a normal distribution.

[0086] Importantly, it is possible to standardise results such that given a calculated mean (μ) and standard deviation (σ) for a population it is possible to determine the probability of any specific result occurring. Standardisation of the distribution model is facilitated by the following relation:

$$Z = \frac{X - μ}{σ} \qquad 5$$

[0087] Where X is an single value (result) in a population.

[0088] If we are considering complementary frames with a single protein structure then the above statistical model requires further analysis. In particular, the possibility exists that a region may be complementary to itself, as indicated in the diagram below.

[image]

[0089] Reverse turn motifs within proteins. A region of protein may be complementary to itself In this scenario, A-S, L-K and V-D are complementary partners. A six amino acid wide frame would thus be reported (in reverse orientation). A frame of this type is only specified by half of the residues in the frame. Such a frame is called a reverse turn.

[0090] In this scenario, once half of the frame length has been selected with complementary partners, there is a finite probability that those partners are the sequential neighbouring amino acids to those already selected. The probability of this occurring in any protein of any sequence is:

Ex=p^{f}^{^{/2}}(S−f)

[0091] Where f is the frame size for analysis, and S is the sequence length and p is the average probability of choosing an antisense amino acid.

[0092] The software of the embodiment incorporates all of the statistical models reported above such that it may assess whether a frame qualifies as a forward frame, reverse frame, or reverse turn.

### EXAMPLE 1

### Protein and Nucleotide Sequence Databases Amenable for Analysis Using the Process

[0093] Major Nucleic acid databases

| Database | Description | Web site address |
|---|---|---|
| Genbank | The Genbank database is a repository for | Http://www.ncbi. |
| NCBI | nucleotide data. | nlm.nih.gov/ |
| National Center for | The NCBI provides facilities to search for | |
| Biotechnology Information | sequences in Genbank by text or by sequence | |
| | similarity and to submit new sequences. | |
| EMBL | The EMBL database is a repository for nucleotide | http://www.ebi.ac |
| | data. | .uk |
| | The EBI provides facilities to search for | |
| | sequences by text or by sequence similarity and to | |
| | submit new sequences. | |
| DbEST | The dbEST database is a repository for Expressed | http://www.ncbi.n |
| | Sequence Tags (EST) data. | lm.nih.gov/dbES |
| | | T/ |
| Unigene | The Unigene database is a repository for clustered | http://www.ncbi.n |
| | EST data. | lm.nih.gov/UniGe |
| | UniGene is an experimental system for | ne/ |
| | automatically partitioning EST sequences into a | |
| | non-redundant set of gene-oriented clusters. Each | |
| | UniGene cluster contains sequences that represent | |
| | a unique gene, as well as related information such | |
| | as the tissue types in which the gene has been | |
| | expressed and map location. | |
| | Unigene is split up in sections, catagorized by | |
| | species origin. The current three sections are | |
| | Human (hsuinigene), Mouse (mmunigene) and | |
| | Rat (rnunigene) EST clusters. | |
| STACK | STACK is a public database of sequences | http://www.sanbi. |
| | expressed in the human genome. | ac.za/Dbases.html |
| | The STACK project aims to make the most | |
| | comprehensive representation of the sequence of | |
| | each of the expressed genes in the human | |
| | genome, by extensive processing of gene | |
| | fragments to make accurate alignments, highlight | |
| | errors and provide a carefully joined set of | |
| | consensus sequences for each gene. A new | |
| | method to extensively process gene fragments to | |
| | make accurate alignment, prevent errors and | |
| | provide a carefully joined set consensus | |
| | sequences for each gene. | |

[0094] Major Protein Sequence databases

| Database | Description | URL |
|---|---|---|
| SWISS-PROT | Curated protein sequence database which strives | http://www.expasy.ch/sprot/sprot |
| | to provide a high level of annotations (such as the | -top.html |
| | description of the function of a protein, its | |
| | domains structure, post-translational | |
| | modifications, variants, etc), a minimal level of | |
| | redundancy and high level of integration with | |
| | other databases. | |
| TrEMBL | Supplement of SWISS-PROT that contains all the | http://www.expasy.ch/sprot/sprot |
| | translations of EMBL nucleotide sequence entries | -top.html |
| | not yet integrated in SWISS-PROT. | |
| OWL | Non-redundant composite of 4 publicly available | http://www.biochem.ucl.ac.uk/bs |
| | primary sources: SWISS-PROT, PIR (1-3), | m/dbbrowser/OWL/OWL.html |
| | GenBank (translation) and NRL-3D. SWISS- | |
| | PROT is the highest priority source, all others | |
| | being compared against it to eliminate identical | |
| | and trivially different sequences. The strict | |
| | redundancy criteria render OWL relatively | |
| | “small” and hence efficient in similarity searches. | |
| PIR Protein | A comprehensive, annotated, and non-redundant | http://pir.georgetown.edu/ |
| Information | set of protein sequence databases in which entries | |
| Resource | are classified into family groups and alignments | |
| | of each group are available. | |
| SPTR | Comprehensive protein sequence database that | http://bioinformer.ebi.ac.uk/newsl |
| | combines the high quality of annotation in | etter/archives/4/sptr.html |
| | SWISS-PROT with the completeness of the | |
| | weekly updated translation of protein coding | |
| | sequences from the EMBL nucleotide database. | |
| NRL_3D | The NRL_3D database is produced by PIR from | http://www- |
| | sequence and annotation information extracted | nbrf.georgetown.edu/pirwww/sea |
| | from the Brookhaven Protein Databank (PDB) of | rch/textnrl3d.html |
| | crystallographic 3D structures. | |

### EXAMPLE 2

### Algorithm Determined Sequence In IL-1 Receptor Binding to IL-1β

[0095] The programme identified the antisense region LITVLNI in the interleukin 1 type 1 receptor (IL-1R). The biological relevance of this peptide has been demonstrated and these findings are summarised below:

[0096] Program picked out antisense region LITVLNI in the IL-1R receptor.

[0097] This peptide was shown to inhibit the biological activity of IL-1β in two independent in vitro bioassays.

[0098] The effect is dependent on the peptide sequence.

[0099] The same effect is also seen in a Serum Amyloid IL-1 assay (i.e. assay independence).

[0100] The peptide was shown to bind directly to IL-1 by using biosensing techniques

[image]

### EXAMPLE 3

### Demonstration of the Utility of the Process when Applied to the Human Genome

[0101] 1. DNA-Binding Proteins

[0102] Sequence-specific DNA binding by proteins controls transcription (Pabo and Sauer, 1992), recombination (Craig, 1988), restriction (Pingoud and Jeltsch, 1997) and replication (Margulies and Kaguni, 1996). Sequence requirements are usually determined by assays that measure the effects of mutations on binding of DNA and amino acid residues implicated in these interactions.

[0103] The central role of DNA binding proteins in the cell cycle means they have a key role in cell proliferation, tumour formation and progression.

[0104] The identification of anti-sense peptides targetted to such proteins have the potential to be useful targets for the development of therapeutic compounds for the treatment of cancer.

[0105] For instance, Koivunen et al., 1999, identified a novel cyclic decapeptide that not only targetted angiogenic (developing) blood vessels but also inhibited the matrix metalloproteinases MMP-2 and MMP-9 (MMP activity is a requirement of tumour growth, angiogenesis and metastasis). The specificity of this novel peptide for MMP-2 and MMP-9 but not other metalloproteinases suggested it might prove useful in tumour therapy. When injected into mice the peptide impeded both growth and invasion of established tumours.

[0106] This research demonstrates the potential for using specific peptides as agents for targetting tumours and as anticancer therapies.

[0107] 2. The Human Major Histocompatibility Complex

[0108] The human major histocompatibility complex is associated with more diseases than any other region of the human genome, including most autoimmune conditions (e.g. diabetes and rheumatoid arthritis). A search of OMIM retrieved 187 entries under Major Histocompatibility Complex, associated with phenotypes such as multiple sclerosis, coeliac disease, Graves disease and alopecia.

[0109] The first complete sequence of the human MHC region on chromosome 6 has recently been determined (The MHC sequencing consortium, 1999). Over 200 gene loci were identified making this the most gene-dense region of the human genome sequenced so far. Of these, many are of unknown function but at least 40% of the 128 genes predicted to be expressed are involved in immune system function. It also encodes the most polymorphic proteins, the class I and class II molecules, some of which have over 200 allelic variants. This extreme polymorphism is thought to be driven and maintained by the conflict between the immune system and infectious pathogens.

[0110] The importance of this region to human disease makes it an ideal target for analysis to identify novel therapeutic peptides.

### EXAMPLE 4

[0111] The human genome, which is estimated to contain between 80,000 and 140,000 genes was screened for intermolecular peptides using the method described in patent application number GB 9927485.4, filed Nov. 19, 1999. The gene, database accession number, its predicted interacting peptides and their position within the coding sequence of the gene are shown in the attached sequence listing: SEQ ID Nos. [1-3622].

### EXAMPLE 5

### Derivation of Daughter Sequences from Parent Sequences

[0112] For each pair of ‘frames’ of amino acids which are deemed a ‘hit’ by the algorithm the current invention includes derived pairs of composite daughter sequences of shorter frame lengths which automatically fulfil the same ‘complementary’ relationship.

[0113] For example, there is a complementary frame of size 10 between genes (inter-molecular) CBFA2 and ACTR3 of Homo Sapien.:

| GENE1 | GENE2 | Sequence 1 | Location | Sequence 2 | Location | Score |
|---|---|---|---|---|---|---|
| CBFA2 | ACTR3 | DLRFVGRSGR | 133-142 | PTAAPDKTEV | 77-86 | 10 |

[0114] One embodiment of the invention covers the derivation of the following sequences at frame length of 5:

| | | Seq- | | Seq- | Loc- | |
|---|---|---|---|---|---|---|
| GENE | GENE2 | uence 1 | Location | uence 2 | ation | Score |
| CBFA2 | ACTR3 | DLRFV | 133-137 | VETKD | 77-81 | 5 |
| CBFA2 | ACTR3 | LRFVG | 134-138 | ETKDP | 78-82 | 5 |
| CBFA2 | ACTR3 | RFVGR | 135-139 | TKDPA | 79-83 | 5 |
| CBFA2 | ACTR3 | FVGRS | 136-140 | KDPAA | 80-84 | 5 |
| CBFA2 | ACTR3 | VGRSG | 137-141 | DPAAT | 81-85 | 5 |
| CBFA2 | ACTR3 | GRSGR | 138-142 | PAATP | 82-86 | 5 |

[0115] One embodiment of the invention covers the derivation of the following sequences at frame length of 6:

| GENE | GENE2 | Sequence 1 | Location | Sequence 2 | Location | Score |
|---|---|---|---|---|---|---|
| CBFA2 | ACTR3 | DLRFVG | 133-138 | VETKDP | 77-82 | 6 |
| CBFA2 | ACTR3 | LRFVGR | 134-139 | ETKDPA | 78-83 | 6 |
| CBFA2 | ACTR3 | RFVGRS | 135-140 | TKDPAA | 79-84 | 6 |
| CBFA2 | ACTR3 | FVGRSG | 136-141 | KDPAAT | 80-85 | 6 |
| CBFA2 | ACTR3 | VGRSGR | 137-142 | DPAATP | 81-86 | 6 |

[0116] One embodiment of the invention covers the derivation of the following sequences at frame length of 7:

| GENE | GENE2 | Sequence 1 | Location | Sequence 2 | Location | Score |
|---|---|---|---|---|---|---|
| CBFA2 | ACTR3 | DLRFVGR | 133-139 | VETKDPA | 77-83 | 7 |
| CBFA2 | ACTR3 | LRFVGRS | 134-140 | ETKDPAA | 78-84 | 7 |
| CBFA2 | ACTR3 | RFVGRSG | 135-141 | TKDPAAT | 79-85 | 7 |
| CBFA2 | ACTR3 | FVGRSGR | 136-142 | KDPAATP | 80-86 | 7 |

[0117] One embodiment of the invention covers the derivation of the following sequences at frame length of 8:

| GENE | GENE2 | Sequence 1 | Location | Sequence 2 | Location | Score |
|---|---|---|---|---|---|---|
| CBFA2 | ACTR3 | DLRFVGRS | 133-140 | VETKDPAA | 77-84 | 8 |
| CBFA2 | ACTR3 | LRFVGRSG | 134-141 | ETKDPAAT | 78-85 | 8 |
| CBFA2 | ACTR3 | RFVGRSGR | 135-142 | TKDPAATP | 79-86 | 8 |

[0118] One embodiment of the invention covers the derivation of the following sequences at frame length of 9:

| GENE | GENE2 | Sequence 1 | Location | Sequence 2 | Location | Score |
|---|---|---|---|---|---|---|
| CBFA2 | ACTR3 | DLRFVGRSG | 133-141 | VETKDPAAT | 77-85 | 9 |
| CBFA2 | ACTR3 | LRFVGRSGR | 134-142 | ETKDPAATP | 78-86 | 9 |

### EXAMPLE 6

[0119] The human genome, which is estimated to contain between 80,000 and 140,000 genes was screened for intramolecular peptides using the method described in patent application number GB 9927485.4, filed Nov. 19, 1999. The gene, database accession number, its predicted interacting peptides and their position within the coding sequence of the gene are shown in the attached sequence listing: SEQ ID Nos. [3624-4203].

### EXAMPLE 7

### Derivation of Daughter Sequences from Parent Sequences

[0120] For each pair of ‘frames’ of amino acids which are deemed a ‘hit’ by the algorithm the current invention includes derived pairs of composite daughter sequences of shorter frame lengths which automatically fulfil the same ‘complementary’ relationship.

[0121] For example, gene ADRAIB in Homo Sapiens contains the following intra-molecular complementary relationship of frame length 10:

| GENE | Sequence 1 | Location | Sequence 2 | Location | Score |
|---|---|---|---|---|---|
| ADRA1B | GGGSAGGAAP | 28-37 | GGGSAGGAAP | 28-37 | 10 |

[0122] One embodiment of the invention covers the derivation of the following sequences at frame length of 5:

| GENE | Sequence 1 | Location | Sequence 2 | Location | Score |
|---|---|---|---|---|---|
| ADRA1B | GGGSA | 28-32 | PAAGG | 37-33 | 5 |
| ADRA1B | GGSAG | 29-33 | AAGGA | 36-32 | 5 |
| ADRA1B | GSAGG | 30-34 | AGGAS | 35-31 | 5 |
| ADRA1B | SAGGA | 31-35 | GGASG | 34-30 | 5 |
| ADRA1B | AGGAA | 32-36 | GASGG | 33-29 | 5 |
| ADRA1B | GGAAP | 33-37 | ASGGG | 32-28 | 5 |

[0123] One embodiment of the invention covers the derivation of the following sequences at frame length of 6:

| GENE | Sequence 1 | Location | Sequence 2 | Location | Score |
|---|---|---|---|---|---|
| ADRA1B | GGGSAG | 28-33 | PAAGGA | 37-32 | 6 |
| ADRA1B | GGSAGG | 29-34 | AAGGAS | 36-31 | 6 |
| ADRA1B | GSAGGA | 30-35 | AGGASG | 35-30 | 6 |
| ADRA1B | SAGGAA | 31-36 | GGASGG | 34-29 | 6 |
| ADRA1B | AGGAAP | 32-37 | GASGGG | 33-28 | 6 |

[0124] One embodiment of the invention covers the derivation of the following sequences at frame length of 7:

| GENE | Sequence 1 | Location | Sequence 2 | Location | Score |
|---|---|---|---|---|---|
| ADRA1B | GGGSAGG | 28-34 | PAAGGAS | 37-31 | 7 |
| ADRA1B | GGSAGGA | 29-35 | AAGGASG | 36-30 | 7 |
| ADRA1B | GSAGGAA | 30-36 | AGGASGG | 35-29 | 7 |
| ADRA1B | SAGGAAP | 31-37 | GGASGGG | 34-28 | 7 |

[0125] One embodiment of the invention covers the derivation of the following sequences at frame length of 8:

| | | Loc- | | | |
|---|---|---|---|---|---|
| GENE | Sequence 1 | ation | Sequence 2 | Location | Score |
| ADRA1B | GGGSAGGA | 28-35 | PAAGGASG | 37-30 | 8 |
| ADRA1B | GGSAGGAA | 29-36 | AAGGASGG | 36-29 | 8 |
| ADRA1B | GSAGGAAP | 30-37 | AGGASGGG | 35-28 | 8 |

[0126] One embodiment of the invention covers the derivation of the following sequences at frame length of 9:

| GENE | Sequence 1 | Location | Sequence 2 | Location | Score |
|---|---|---|---|---|---|
| ADRA1B | GGGSAGGAA | 28-36 | PAAGGASGG | 37-29 | 9 |
| ADRA1B | GGSAGGAAP | 29-37 | AAGGASGGG | 36-28 | 9 |

### EXAMPLE 8

### The Amino Acid Pairings Resulting from Reading the Anticodon for Naturally Occuring Amino Acid Residues in the 5′-3′ Direction

[0127]

| | | | | | | | Comple- |
|---|---|---|---|---|---|---|---|
| | | Comple- | | | | Comple- | mentary |
| Amino | co- | mentary | Complementary | Amino | co- | mentary | Amino |
| Acid | don | codon | Amino acid | Acid | don | codon | acid |
| Alanine | GCA | UGC | Cysteine | Serine | UCA | UGA | Stop |
| | GCG | CGC | Arginine | | UCC | GGA | Glycine |
| | GCC | GGC | Glycine | | UCG | CGA | Arginine |
| | GCU | AGC | Serine | | UCU | AGA | Arginine |
| | | | | | AGC | GCU | Alanine |
| | | | | | AGU | ACU | Threonine |
| Arginine | CGG | CCG | Proline | Glutamine | CAA | UUG | Leucine |
| | CGA | UCG | Serine | | CAG | CUG | Leucine |
| | CGC | GCG | Alanine | | | | |
| | CGU | ACG | Threonine | | | | |
| | AGG | CCU | Proline | | | | |
| | AGA | UCU | Serine | | | | |
| Aspartic Acid | GAC | GUC | Valine | Glycine | GGA | UCC | Serine |
| | GAU | AUC | Isoleucine | | GGC | GCC | Alanine |
| | | | | | GGU | ACC | Threonine |
| | | | | | GGG | CCC | Proline |
| Asparagine | AAC | GUU | Valine | Histidine | CAC | GUG | Valine |
| | AAU | AUU | Isoleucine | | CAU | AUG | Methionine |
| Cysteine | UGU | ACA | Threonine | Isoleucine | AUA | UAU | Tyrosine |
| | UGC | GCA | Alanine | | AUC | GAU | Aspartic |
| | | | | | AUU | AAU | acid |
| | | | | | | | Asparagine |
| Glutamic | GAA | UUC | Phenylalanine | Leucine | CUG | CAG | Glutamine |
| Acid | GAG | CUC | Leucine | | CUC | GAG | Glutamic |
| | | | | | CUU | AAG | acid |
| | | | | | UUA | UAA | Lysine |
| | | | | | CUA | UAG | Stop |
| | | | | | UUG | CAA | Stop |
| | | | | | CUG | CAG | Glutamine |
| | | | | | | | Glutamine |
| Lysine | AAA | UUU | Phenylalanine | Threonine | ACA | UGU | Cysteine |
| | AAG | CUU | Leucine | | ACG | CGU | Arginine |
| | | | | | ACC | GGU | Glycine |
| | | | | | ACU | AGU | Serine |
| Methionine | AUG | CAU | Histidine | Tryptophan | UGG | CCA | Proline |
| Phenylalanine | UUU | AAA | Lysine | Tyrosine | UAC | GUA | Valine |
| | UUC | GAA | Glutamic Acid | | UAU | AUA | Isoleucine |
| Proline | CCA | UGG | Tryptophan | Valine | GUA | UAC | Tyrosine |
| | CCC | GGG | Glycine | | GUG | CAC | Histidine |
| | CCU | AGG | Arginine | | GUC | GAC | Aspartic |
| | CCG | CGG | Arginine | | GUU | AAC | Acid |
| | | | | | | | Asparagine |

### EXAMPLE 9

[0128] The relationships between amino acids and the residues encoded in the complementary strand reading 3′-5′

| | | | | | | | Comple- |
|---|---|---|---|---|---|---|---|
| | | Comple- | | | | Comple- | mentary |
| Amino | co- | mentary | Complementary | Amino | co- | mentary | Amino |
| Acid | don | codon | Amino acid | Acid | don | codon | acid |
| Alanine | GCA | CGU | Arginine | Serine | UCA | AGU | Serine |
| | GCG | CGC | | | UCC | AGG | Arginine |
| | GCC | CGG | | | UCG | AGC | Serine |
| | GCU | CGA | | | UCU | AGA | Arginine |
| | | | | | AGC | UCG | Serine |
| | | | | | AGU | UCA | Serine |
| Arginine | CGG | GCC | Alanine | Glutamine | CAA | GUU | Valine |
| | CGA | GCU | Alanine | | CAG | GUC | Valine |
| | CGC | GCG | Alanine | | | | |
| | CGU | GCA | Alanine | | | | |
| | AGG | UCC | Serine | | | | |
| | AGA | UCU | Serine | | | | |
| Aspartic Acid | GAC | GUC | Valine | Glycine | GGA | CCU | Proline |
| | GAU | AUC | Isoleucine | | GGC | CCG | Proline |
| | | | | | GGU | CCA | Proline |
| | | | | | GGG | CCC | Proline |
| Asparagine | AAC | UUG | Leucine | Histidine | CAC | GUG | Valine |
| | AAU | UUA | Leucine | | CAU | GUA | Valine |
| Cysteine | UGU | ACA | Threonine | Isoleucine | AUA | UAU | Tyrosine |
| | UGC | ACG | Threonine | | AUC | UAG | Stop |
| | | | | | AUU | UAA | Stop |
| Glutamic | GAA | CUU | Leucine | Leucine | CUG | GAC | Asp |
| Acid | GAG | CUG | Leucine | | CUC | GAG | Glutamic |
| | | | | | CUU | GAA | acid |
| | | | | | UUA | AAU | Glutamic |
| | | | | | CUA | GAU | Acid |
| | | | | | UUG | AAC | Asparagine |
| | | | | | CUG | GAC | Aspartic |
| | | | | | | | Acid |
| | | | | | | | Asparagine |
| | | | | | | | Aspartic |
| | | | | | | | Acid |
| Lysine | AAA | UUU | Phenylalanine | Threonine | ACA | UGU | Cysteine |
| | AAG | UUC | Phenylalanine | | ACG | UGC | Cysteine |
| | | | | | ACC | UGG | Tryptophan |
| | | | | | ACU | UGA | Stop |
| Methionine | AUG | UAC | Tyrosine | Tryptophan | UGG | ACC | Threonine |
| Phenylalanine | UUU | AAA | Lysine | Tyrosine | UAC | AUG | Methionine |
| | UUC | AAG | Lysine | | UAU | AUA | Isoleucine |
| Proline | CCA | GGU | Glycine | Valine | GUA | CAU | Histidine |
| | CCC | GGG | Glycine | | GUG | CAC | Histidine |
| | CCU | GGA | Glycine | | GUC | CAG | Glutamine |
| | CCG | GGC | Glycine | | GUU | CAA | Glutamine |

### REFERENCES

[0129] All publications, patents, and patent applications cited are hereby incorporated by reference in their entirety.

[0130] Baranyi L, Campbell W, Ohshima K, Fujimoto S, Boros M and Okada H. 1995. The antisense homology box: a new motif within proteins that encodes biologically active peptides. Nature Medicine. 1:894-901.

[0131] Craig, N. L. 1998. The mechanism of conservative site-specific recombination. Annu. Rev. Genet. 22: 77-105.

[0132] Gaasterland T. 1998. Structural genomics: Bioinformatics in the driver's seat. Nature Biotechnology 16: 645-627.

[0133] Goldstein D J. 1998. An unacknowledged problem for structural genomics? Nature Biotechnology 16: 696-697.

[0134] Koivunen E, Arap W, Valtanen H, Rainisalo A, Medina O P, Heikkila P, Kantor C, Gahmberg C G, Salo T, Konttinen Y T, Sorsa T, Ruoslahti E, Pasqualini R. 1999. Tumor targeting with a selective gelatinase inhibitor. Nat Biotechnol. 17: 768-74.

[0135] Margulies, C. & Kaguni, J. M. 1996. Ordered and sequential binding of DNA protein to oriC, the chromosomal origin of Escherichia coli. J. Biol. Chem. 271: 17035-17040.

[0136] The MHC sequencing consortium. 1999. Complete sequence and gene map of a human major histocompatibility complex. Nature 401:921-3.

[0137] Pabo, C. O. & Sauer, R. T. 1992. Transcription factors: structural families and principles of DNA recognition. Annu. Rev. Biochem. 61: 1053-1095.

[0138] Pingoud, A. & Jeltsch, A. 1997. Recognition and cleavage of DNA by type-II restriction endonucleases. Eur. J. Biochem. 246: 1-22.

[0139] Sansom C. 1998. Extending the boundaries of molecular modelling. Nature Biotechnology 16: 917-918.

[0140] Stryer L. Biochmistry. 4^{th} Edition. Freeman and Company, New York 1997.

We claim:

1. A set of peptide ligands; said set consisting of specific complementary peptides to proteins encoded by genes of the human genome.

2. A set of peptide ligands according to claim 1, wherein the sequences of the peptides in the set are intra-molecular complementary peptide sequences.

3. A set of peptide ligands according to claim 1, wherein the sequences of the peptides in the set are inter-molecular complementary peptide sequences.

4. A novel peptide having a sequence which is a member of a set according to any preceding claim, capable of antagonising or agonising a specific interaction of a protein with another protein or receptor.

5. Use of a set of peptides according to any of claims 1 to 3 in an assay for screening and identification of one or more peptides according to claim 4.

6. Use according to claim 5 wherein the identified peptide(s) is a drug candidate.

7. Use according to claim 5 wherein the identified peptide(s) is a pro-drug.

8. A partly or wholly non-peptide mimetic of a peptide drug candidate or pro-drug according to claim 4, 6 or 7, identified by use of the set of peptides according to claim 5.

9. A method for processing sequence data comprising the steps of;
selecting a first protein sequence and a second protein sequence;
selecting a frame size corresponding to a number of sequence elements
such as amino acids or triplet codons, a score threshold, and a frame existence probability threshold;
comparing each frame of the first sequence with each frame of the second sequence by comparing pairs of sequence elements at corresponding positions within each such pair of frames to evaluate a complementary relationship score for each pair of frames;
storing details of any pairs of frames for which the score equals or exceeds the score threshold;
evaluating for each stored pair of frames the probability of the existence of that complementary pair of frames existing, on the basis of the number of possible complementary sequence elements existing for each sequence element in the pair of frames; and
discarding any stored pairs of frames for which the evaluated probability is greater than the probability threshold; wherein each frame is a peptide sequence of defined length.

10. A method according to claim 9, in which the first sequence is identical to the second sequence and a frame at a given position in the first sequence is only compared with frames in the second sequence at the same given position or at later positions in the second sequence, in order to eliminate repetition of comparisons.

11. A method according to claim 9 or 10, in which the sequence elements at corresponding positions within each of a pair of frames are compared sequentially, each such pair of sequence elements generating a score which is added to an aggregate score for the pair of frames.

12. A method according to claim 11, in which if the aggregate score reaches the score threshold before all the pairs of sequence elements in the pair of frames have been compared, details of the pair of frames are immediately stored and a new pair of frames is selected for comparison.

13. A method according to any preceding claim, in which the sequence elements are amino acids and pairs of amino acids are compared by using an antisense score list.

14. A method according to any of claims 9 to 12, in which the sequence elements are triplet codons and pairs of codons in corresponding positions within each of the pairs of triplet codons are compared by using an antisense score list.

15. A method for processing sequence data substantially as described herein with reference to FIGS. 1 to 6.

16. A pair of frames or a list of pairs of frames being the product of the method of any of claims 9 to 15, optionally carried on a computer-readable medium.

17. A frame being the product of the method of any of claims 9 to 15, optionally carried on a computer-readable medium.

18. A peptide, pair of complementary peptides, or set of peptides, being the peptide(s) having the sequence of the frame(s) of claims 16 or 17.

19. A method for identifying a peptide drug candidate or pro-drug, which method includes the steps of (i) identifying a set of specific complementary peptides according to any of claims 1 to 4; (ii) screening the set for specific protein interaction activity; and (iii) identifying one or more peptide(s) according to claim 5.

The application's sequence listing, which the Patent Office published only in electronic form, follows.

SEQUENCE LISTING (4203 sequences)

SEQ ID NO: 1 - protein, 10 aa, Homo Sapiens
  sequence located in CBFA2 OR AML1 at 133-142 and may interact with Sequence 2 in this patent.
DLRFVGRSGR

SEQ ID NO: 2 - protein, 10 aa, Homo Sapiens
  sequence located in ACTR3 OR ARP3 at 77-86 and may interact with Sequence 1 in this patent.
PTAAPDKTEV

SEQ ID NO: 3 - protein, 10 aa, Homo Sapiens
  sequence located in CBFA2 OR AML1 at 271-280 and may interact with Sequence 4 in this patent.
PATPISPGRA

SEQ ID NO: 4 - protein, 10 aa, Homo Sapiens
  sequence located in COL4A1 at 595-604 and may interact with Sequence 3 in this patent.
GSRGDTGPPG

SEQ ID NO: 5 - protein, 10 aa, Homo Sapiens
  sequence located in CBFA2 OR AML1 at 28-37 and may interact with Sequence 6 in this patent.
ALPLGAPDAG

SEQ ID NO: 6 - protein, 10 aa, Homo Sapiens
  sequence located in COL11A1 at 1269-1278 and may interact with Sequence 5 in this patent.
AGVGGPKGER

SEQ ID NO: 7 - protein, 10 aa, Homo Sapiens
  sequence located in CBFA2 OR AML1 at 331-340 and may interact with Sequence 8 in this patent.
TPVTSGIGIG

SEQ ID NO: 8 - protein, 10 aa, Homo Sapiens
  sequence located in CHD1 at 1093-1102 and may interact with Sequence 7 in this patent.
RRYSGSDSDS

SEQ ID NO: 9 - protein, 10 aa, Homo Sapiens
  sequence located in CBFA2 OR AML1 at 37-46 and may interact with Sequence 10 in this patent.
GAALAGKLRS

SEQ ID NO: 10 - protein, 10 aa, Homo Sapiens
  sequence located in PDE9A at 117-126 and may interact with Sequence 9 in this patent.
PRREGAFESG

SEQ ID NO: 11 - protein, 10 aa, Homo Sapiens
  sequence located in CBFA2 OR AML1 at 276-285 and may interact with Sequence 12 in this patent.
SPGRASGMTT

SEQ ID NO: 12 - protein, 10 aa, Homo Sapiens
  sequence located in CTAG at 58-67 and may interact with Sequence 11 in this patent.
GGAPRGPHGG

SEQ ID NO: 13 - protein, 10 aa, Homo Sapiens
  sequence located in CBFA2 OR AML1 at 140-149 and may interact with Sequence 14 in this patent.
SGRGKSFTLT

SEQ ID NO: 14 - protein, 10 aa, Homo Sapiens
  sequence located in POLZ OR REV3 OR REV3L at 1516-1525 and may interact with Sequence 13 in this patent.
TPSAFGEGQS

SEQ ID NO: 15 - protein, 10 aa, Homo Sapiens
  sequence located in CBFA2 OR AML1 at 139-148 and may interact with Sequence 16 in this patent.
RSGRGKSFTL

SEQ ID NO: 16 - protein, 10 aa, Homo Sapiens
  sequence located in POLZ OR REV3 OR REV3L at 1515-1524 and may interact with Sequence 15 in this patent.
STPSAFGEGQ

SEQ ID NO: 17 - protein, 10 aa, Homo Sapiens
  sequence located in CBFA2 OR AML1 at 189-198 and may interact with Sequence 18 in this patent.
PGSLSFSERL

SEQ ID NO: 18 - protein, 10 aa, Homo Sapiens
  sequence located in DSC3 OR DSC4 at 716-725 and may interact with Sequence 17 in this patent.
GATKGKRFPE

SEQ ID NO: 19 - protein, 10 aa, Homo Sapiens
  sequence located in CBFA2 OR AML1 at 188-197 and may interact with Sequence 20 in this patent.
KPGSLSFSER

SEQ ID NO: 20 - protein, 10 aa, Homo Sapiens
  sequence located in DSC3 OR DSC4 at 715-724 and may interact with Sequence 19 in this patent.
FGATKGKRFP

SEQ ID NO: 21 - protein, 10 aa, Homo Sapiens
  sequence located in CBFA2 OR AML1 at 135-144 and may interact with Sequence 22 in this patent.
RFVGRSGRGK

SEQ ID NO: 22 - protein, 10 aa, Homo Sapiens
  sequence located in EDG1 at 236-245 and may interact with Sequence 21 in this patent.
LPPTRPTDKP

SEQ ID NO: 23 - protein, 10 aa, Homo Sapiens
  sequence located in CBFA2 OR AML1 at 289-298 and may interact with Sequence 24 in this patent.
ELSSRLSTAP

SEQ ID NO: 24 - protein, 10 aa, Homo Sapiens
  sequence located in EPHB3 OR ETK2 OR HEK2 at 540-549 and may interact with Sequence 23 in this patent.
FETTSERGSG

SEQ ID NO: 25 - protein, 10 aa, Homo Sapiens
  sequence located in CBFA2 OR AML1 at 430-439 and may interact with Sequence 26 in this patent.
GSHSNSPTNM

SEQ ID NO: 26 - protein, 10 aa, Homo Sapiens
  sequence located in FASN OR FAS at 1082-1091 and may interact with Sequence 25 in this patent.
PRVTVAGGVH

SEQ ID NO: 27 - protein, 10 aa, Homo Sapiens
  sequence located in CBFA2 OR AML1 at 135-144 and may interact with Sequence 28 in this patent.
RFVGRSGRGK

SEQ ID NO: 28 - protein, 10 aa, Homo Sapiens
  sequence located in FRAP at 1856-1865 and may interact with Sequence 27 in this patent.
TENSPTPSPL

SEQ ID NO: 29 - protein, 10 aa, Homo Sapiens
  sequence located in CBFA2 OR AML1 at 62-71 and may interact with Sequence 30 in this patent.
LVRTDSPNFL

SEQ ID NO: 30 - protein, 10 aa, Homo Sapiens
  sequence located in FRAP at 742-751 and may interact with Sequence 29 in this patent.
EHSGIGRIKE

SEQ ID NO: 31 - protein, 10 aa, Homo Sapiens
  sequence located in CBFA2 OR AML1 at 61-70 and may interact with Sequence 32 in this patent.
ELVRTDSPNF

SEQ ID NO: 32 - protein, 10 aa, Homo Sapiens
  sequence located in FRAP at 741-750 and may interact with Sequence 31 in this patent.
LEHSGIGRIK

SEQ ID NO: 33 - protein, 10 aa, Homo Sapiens
  sequence located in CBFA2 OR AML1 at 273-282 and may interact with Sequence 34 in this patent.
TPISPGRASG

SEQ ID NO: 34 - protein, 10 aa, Homo Sapiens
  sequence located in Unknown at 202-211 and may interact with Sequence 33 in this patent.
SGNARPTGGA

SEQ ID NO: 35 - protein, 10 aa, Homo Sapiens
  sequence located in CBFA2 OR AML1 at 14-23 and may interact with Sequence 36 in this patent.
TPPSTALSPG

SEQ ID NO: 36 - protein, 10 aa, Homo Sapiens
  sequence located in HMGCS1 OR HMGCS at 97-106 and may interact with Sequence 35 in this patent.
GGGAGGEGGA

SEQ ID NO: 37 - protein, 10 aa, Homo Sapiens
  sequence located in CBFA2 OR AML1 at 272-281 and may interact with Sequence 38 in this patent.
ATPISPGRAS

SEQ ID NO: 38 - protein, 10 aa, Homo Sapiens
  sequence located in HSR1 at 138-147 and may interact with Sequence 37 in this patent.
AGATWGNGSG

SEQ ID NO: 39 - protein, 10 aa, Homo Sapiens
  sequence located in CBFA2 OR AML1 at 272-281 and may interact with Sequence 40 in this patent.
ATPISPGRAS

SEQ ID NO: 40 - protein, 10 aa, Homo Sapiens
  sequence located in KRT10 at 533-542 and may interact with Sequence 39 in this patent.
GSSSGGYGGG

SEQ ID NO: 41 - protein, 10 aa, Homo Sapiens
  sequence located in CBFA2 OR AML1 at 272-281 and may interact with Sequence 42 in this patent.
ATPISPGRAS

SEQ ID NO: 42 - protein, 10 aa, Homo Sapiens
  sequence located in KRT1 OR KRTA at 580-589 and may interact with Sequence 41 in this patent.
GSSSGGYRGG

SEQ ID NO: 43 - protein, 10 aa, Homo Sapiens
  sequence located in CBFA2 OR AML1 at 273-282 and may interact with Sequence 44 in this patent.
TPISPGRASG

SEQ ID NO: 44 - protein, 10 aa, Homo Sapiens
  sequence located in KRT1 OR KRTA at 579-588 and may interact with Sequence 43 in this patent.
SGSSSGGYRG

SEQ ID NO: 45 - protein, 10 aa, Homo Sapiens
  sequence located in CBFA2 OR AML1 at 273-282 and may interact with Sequence 46 in this patent.
TPISPGRASG

SEQ ID NO: 46 - protein, 10 aa, Homo Sapiens
  sequence located in NFKB2 at 360-369 and may interact with Sequence 45 in this patent.
SGGAAGGYGG

SEQ ID NO: 47 - protein, 10 aa, Homo Sapiens
  sequence located in CBFA2 OR AML1 at 273-282 and may interact with Sequence 48 in this patent.
TPISPGRASG

SEQ ID NO: 48 - protein, 10 aa, Homo Sapiens
  sequence located in NFKB2 at 360-369 and may interact with Sequence 47 in this patent.
SGGAAGGYGG

SEQ ID NO: 49 - protein, 10 aa, Homo Sapiens
  sequence located in CBFA2 OR AML1 at 167-176 and may interact with Sequence 50 in this patent.
KITVDGPREP

SEQ ID NO: 50 - protein, 10 aa, Homo Sapiens
  sequence located in CKB OR CKBB at 212-221 and may interact with Sequence 49 in this patent.
RFPRPVYCNL

SEQ ID NO: 51 - protein, 10 aa, Homo Sapiens
  sequence located in CBFA2 OR AML1 at 360-369 and may interact with Sequence 52 in this patent.
GSSQAQGGPF

SEQ ID NO: 52 - protein, 10 aa, Homo Sapiens
  sequence located in Unknown at 8-17 and may interact with Sequence 51 in this patent.
PGTLSLSPGE

SEQ ID NO: 53 - protein, 10 aa, Homo Sapiens
  sequence located in CBFA2 OR AML1 at 360-369 and may interact with Sequence 54 in this patent.
GSSQAQGGPF

SEQ ID NO: 54 - protein, 10 aa, Homo Sapiens
  sequence located in Unknown at 8-17 and may interact with Sequence 53 in this patent.
PGTLSLSPGE

SEQ ID NO: 55 - protein, 10 aa, Homo Sapiens
  sequence located in CBFA2 OR AML1 at 360-369 and may interact with Sequence 56 in this patent.
GSSQAQGGPF

SEQ ID NO: 56 - protein, 10 aa, Homo Sapiens
  sequence located in Unknown at 8-17 and may interact with Sequence 55 in this patent.
PGTLSLSPGE

SEQ ID NO: 57 - protein, 10 aa, Homo Sapiens
  sequence located in CBFA2 OR AML1 at 280-289 and may interact with Sequence 58 in this patent.
ASGMTTLSAE

SEQ ID NO: 58 - protein, 10 aa, Homo Sapiens
  sequence located in MUC2 OR SMUC at 271-280 and may interact with Sequence 57 in this patent.
FSRQCSHAGG

SEQ ID NO: 59 - protein, 10 aa, Homo Sapiens
  sequence located in CBFA2 OR AML1 at 281-290 and may interact with Sequence 60 in this patent.
SGMTTLSAEL

SEQ ID NO: 60 - protein, 10 aa, Homo Sapiens
  sequence located in MUC2 OR SMUC at 270-279 and may interact with Sequence 59 in this patent.
EFSRQCSHAG

SEQ ID NO: 61 - protein, 10 aa, Homo Sapiens
  sequence located in CBFA2 OR AML1 at 282-291 and may interact with Sequence 62 in this patent.
GMTTLSAELS

SEQ ID NO: 62 - protein, 10 aa, Homo Sapiens
  sequence located in MUC2 OR SMUC at 269-278 and may interact with Sequence 61 in this patent.
AEFSRQCSHA

SEQ ID NO: 63 - protein, 10 aa, Homo Sapiens
  sequence located in CBFA2 OR AML1 at 366-375 and may interact with Sequence 64 in this patent.
GGPFQASSPS

SEQ ID NO: 64 - protein, 10 aa, Homo Sapiens
  sequence located in SLC9A5 OR NHE5 at 72-81 and may interact with Sequence 63 in this patent.
SSGELRTGGA

SEQ ID NO: 65 - protein, 10 aa, Homo Sapiens
  sequence located in CBFA2 OR AML1 at 142-151 and may interact with Sequence 66 in this patent.
RGKSFTLTIT

SEQ ID NO: 66 - protein, 10 aa, Homo Sapiens
  sequence located in NF1 at 656-665 and may interact with Sequence 65 in this patent.
ASLRKGKGNS

SEQ ID NO: 67 - protein, 10 aa, Homo Sapiens
  sequence located in CBFA2 OR AML1 at 8-17 and may interact with Sequence 68 in this patent.
STSRRFTPPS

SEQ ID NO: 68 - protein, 10 aa, Homo Sapiens
  sequence located in PIK3CA at 24-33 and may interact with Sequence 67 in this patent.
RGGGEPPRGR

SEQ ID NO: 69 - protein, 10 aa, Homo Sapiens
  sequence located in CBFA2 OR AML1 at 3-12 and may interact with Sequence 70 in this patent.
IPVDASTSRR

SEQ ID NO: 70 - protein, 10 aa, Homo Sapiens
  sequence located in PLCG1 OR PLC1 at 1278-1287 and may interact with Sequence 69 in this patent.
APRRTRVNGD

SEQ ID NO: 71 - protein, 10 aa, Homo Sapiens
  sequence located in CBFA2 OR AML1 at 12-21 and may interact with Sequence 72 in this patent.
RFTPPSTALS

SEQ ID NO: 72 - protein, 10 aa, Homo Sapiens
  sequence located in PTS at 3-12 and may interact with Sequence 71 in this patent.
TEGGGRRCQA

SEQ ID NO: 73 - protein, 10 aa, Homo Sapiens
  sequence located in CBFA2 OR AML1 at 11-20 and may interact with Sequence 74 in this patent.
RRFTPPSTAL

SEQ ID NO: 74 - protein, 10 aa, Homo Sapiens
  sequence located in PTS at 2-11 and may interact with Sequence 73 in this patent.
STEGGGRRCQ

SEQ ID NO: 75 - protein, 10 aa, Homo Sapiens
  sequence located in CBFA2 OR AML1 at 273-282 and may interact with Sequence 76 in this patent.
TPISPGRASG

SEQ ID NO: 76 - protein, 10 aa, Homo Sapiens
  sequence located in RAB5C at 190-199 and may interact with Sequence 75 in this patent.
ATGAPGRNRG

SEQ ID NO: 77 - protein, 10 aa, Homo Sapiens
  sequence located in CBFA2 OR AML1 at 192-201 and may interact with Sequence 78 in this patent.
LSFSERLSEL

SEQ ID NO: 78 - protein, 10 aa, Homo Sapiens
  sequence located in RANGAP1 at 8-17 and may interact with Sequence 77 in this patent.
KLAETLAKTQ

SEQ ID NO: 79 - protein, 10 aa, Homo Sapiens
  sequence located in CBFA2 OR AML1 at 114-123 and may interact with Sequence 80 in this patent.
SAELRNATAA

SEQ ID NO: 80 - protein, 10 aa, Homo Sapiens
  sequence located in RAP1GA1 at 590-599 and may interact with Sequence 79 in this patent.
TGLESVSSSG

SEQ ID NO: 81 - protein, 10 aa, Homo Sapiens
  sequence located in CBFA2 OR AML1 at 273-282 and may interact with Sequence 82 in this patent.
TPISPGRASG

SEQ ID NO: 82 - protein, 10 aa, Homo Sapiens
  sequence located in RGS12 at 1393-1402 and may interact with Sequence 81 in this patent.
TGSAPGRDGG

SEQ ID NO: 83 - protein, 10 aa, Homo Sapiens
  sequence located in CBFA2 OR AML1 at 10-19 and may interact with Sequence 84 in this patent.
SRRFTPPSTA

SEQ ID NO: 84 - protein, 10 aa, Homo Sapiens
  sequence located in RPL4 OR RPL1 at 62-71 and may interact with Sequence 83 in this patent.
TSAESWGTGR

SEQ ID NO: 85 - protein, 10 aa, Homo Sapiens
  sequence located in CBFA2 OR AML1 at 273-282 and may interact with Sequence 86 in this patent.
TPISPGRASG

SEQ ID NO: 86 - protein, 10 aa, Homo Sapiens
  sequence located in RNASE6 OR RNS6 at 109-118 and may interact with Sequence 85 in this patent.
CRDTGSSRAP

SEQ ID NO: 87 - protein, 10 aa, Homo Sapiens
  sequence located in CBFA2 OR AML1 at 393-402 and may interact with Sequence 88 in this patent.
GGERSPPRIL

SEQ ID NO: 88 - protein, 10 aa, Homo Sapiens
  sequence located in SIM1 at 353-362 and may interact with Sequence 87 in this patent.
QDSWRTALST

SEQ ID NO: 89 - protein, 10 aa, Homo Sapiens
  sequence located in CBFA2 OR AML1 at 273-282 and may interact with Sequence 90 in this patent.
TPISPGRASG

SEQ ID NO: 90 - protein, 10 aa, Homo Sapiens
  sequence located in SRI at 16-25 and may interact with Sequence 89 in this patent.
GGYGGAPGGP

SEQ ID NO: 91 - protein, 10 aa, Homo Sapiens
  sequence located in CBFA2 OR AML1 at 164-173 and may interact with Sequence 92 in this patent.
RAIKITVDGP

SEQ ID NO: 92 - protein, 10 aa, Homo Sapiens
  sequence located in VCAM1 OR L1CAM at 13-22 and may interact with Sequence 91 in this patent.
PGDFDRNVPR

SEQ ID NO: 93 - protein, 10 aa, Homo Sapiens
  sequence located in CBFA2 OR AML1 at 37-46 and may interact with Sequence 94 in this patent.
GAALAGKLRS

SEQ ID NO: 94 - protein, 10 aa, Homo Sapiens
  sequence located in HIVEP2 at 337-346 and may interact with Sequence 93 in this patent.
SSGESSFEST

SEQ ID NO: 95 - protein, 10 aa, Homo Sapiens
  sequence located in CBFA2 OR AML1 at 12-21 and may interact with Sequence 96 in this patent.
RFTPPSTALS

SEQ ID NO: 96 - protein, 10 aa, Homo Sapiens
  sequence located in ZNF8 at 489-498 and may interact with Sequence 95 in this patent.
RKSSAGGRKA

SEQ ID NO: 97 - protein, 10 aa, Homo Sapiens
  sequence located in NPR2 OR ANPRB at 44-53 and may interact with Sequence 98 in this patent.
RVGPAVALAV

SEQ ID NO: 98 - protein, 10 aa, Homo Sapiens
  sequence located in LPA at 3566-3575 and may interact with Sequence 97 in this patent.
YGQSYRGTYS

SEQ ID NO: 99 - protein, 10 aa, Homo Sapiens
  sequence located in NPR2 OR ANPRB at 44-53 and may interact with Sequence 100 in this patent.
RVGPAVALAV

SEQ ID NO: 100 - protein, 10 aa, Homo Sapiens
  sequence located in LPA at 3338-3347 and may interact with Sequence 99 in this patent.
NGQSYRGTYS

SEQ ID NO: 101 - protein, 10 aa, Homo Sapiens
  sequence located in NPR2 OR ANPRB at 518-527 and may interact with Sequence 102 in this patent.
SLRGSSYGSL

SEQ ID NO: 102 - protein, 10 aa, Homo Sapiens
  sequence located in ATP7B OR WND OR PWD OR WC1 at 1224-1233 and may interact with Sequence 101 in this patent.
RKTARAIATQ

SEQ ID NO: 103 - protein, 10 aa, Homo Sapiens
  sequence located in NPR2 OR ANPRB at 263-272 and may interact with Sequence 104 in this patent.
RAGPTRATGR

SEQ ID NO: 104 - protein, 10 aa, Homo Sapiens
  sequence located in BTF3L3 at 25-34 and may interact with Sequence 103 in this patent.
PRSGSTCRST

SEQ ID NO: 105 - protein, 10 aa, Homo Sapiens
  sequence located in NPR2 OR ANPRB at 643-652 and may interact with Sequence 106 in this patent.
GSLKSSNCVV

SEQ ID NO: 106 - protein, 10 aa, Homo Sapiens
  sequence located in CDC10 at 292-301 and may interact with Sequence 105 in this patent.
SRKLAAVTYN

SEQ ID NO: 107 - protein, 10 aa, Homo Sapiens
  sequence located in NPR2 OR ANPRB at 265-274 and may interact with Sequence 108 in this patent.
GPTRATGRPW

SEQ ID NO: 108 - protein, 10 aa, Homo Sapiens
  sequence located in COL1A1 at 119-128 and may interact with Sequence 107 in this patent.
PRGPRGPAGP

SEQ ID NO: 109 - protein, 10 aa, Homo Sapiens
  sequence located in NPR2 OR ANPRB at 264-273 and may interact with Sequence 110 in this patent.
AGPTRATGRP

SEQ ID NO: 110 - protein, 10 aa, Homo Sapiens
  sequence located in COL1A1 at 118-127 and may interact with Sequence 109 in this patent.
GPRGPRGPAG

SEQ ID NO: 111 - protein, 10 aa, Homo Sapiens
  sequence located in NPR2 OR ANPRB at 263-272 and may interact with Sequence 112 in this patent.
RAGPTRATGR

SEQ ID NO: 112 - protein, 10 aa, Homo Sapiens
  sequence located in COL1A1 at 117-126 and may interact with Sequence 111 in this patent.
TGPRGPRGPA

SEQ ID NO: 113 - protein, 10 aa, Homo Sapiens
  sequence located in NPR2 OR ANPRB at 261-270 and may interact with Sequence 114 in this patent.
SLRAGPTRAT

SEQ ID NO: 114 - protein, 10 aa, Homo Sapiens
  sequence located in COL3A1 at 597-606 and may interact with Sequence 113 in this patent.
GGPGGPGPQG

SEQ ID NO: 115 - protein, 10 aa, Homo Sapiens
  sequence located in NPR2 OR ANPRB at 264-273 and may interact with Sequence 116 in this patent.
AGPTRATGRP

SEQ ID NO: 116 - protein, 10 aa, Homo Sapiens
  sequence located in COL5A1 at 1255-1264 and may interact with Sequence 115 in this patent.
GPRGPSGAPG

SEQ ID NO: 117 - protein, 10 aa, Homo Sapiens
  sequence located in NPR2 OR ANPRB at 263-272 and may interact with Sequence 118 in this patent.
RAGPTRATGR

SEQ ID NO: 118 - protein, 10 aa, Homo Sapiens
  sequence located in COL5A1 at 1254-1263 and may interact with Sequence 117 in this patent.
PGPRGPSGAP

SEQ ID NO: 119 - protein, 10 aa, Homo Sapiens
  sequence located in NPR2 OR ANPRB at 264-273 and may interact with Sequence 120 in this patent.
AGPTRATGRP

SEQ ID NO: 120 - protein, 10 aa, Homo Sapiens
  sequence located in COL11A1 at 889-898 and may interact with Sequence 119 in this patent.
GSRGARGPTG

SEQ ID NO: 121 - protein, 10 aa, Homo Sapiens
  sequence located in NPR2 OR ANPRB at 261-270 and may interact with Sequence 122 in this patent.
SLRAGPTRAT

SEQ ID NO: 122 - protein, 10 aa, Homo Sapiens
  sequence located in COL16A1 at 1266-1275 and may interact with Sequence 121 in this patent.
GSTGRPGAEG

SEQ ID NO: 123 - protein, 10 aa, Homo Sapiens
  sequence located in NPR2 OR ANPRB at 262-271 and may interact with Sequence 124 in this patent.
LRAGPTRATG

SEQ ID NO: 124 - protein, 10 aa, Homo Sapiens
  sequence located in COL16A1 at 1265-1274 and may interact with Sequence 123 in this patent.
PGSTGRPGAE

SEQ ID NO: 125 - protein, 10 aa, Homo Sapiens
  sequence located in NPR2 OR ANPRB at 263-272 and may interact with Sequence 126 in this patent.
RAGPTRATGR

SEQ ID NO: 126 - protein, 10 aa, Homo Sapiens
  sequence located in COL16A1 at 1264-1273 and may interact with Sequence 125 in this patent.
PPGSTGRPGA

SEQ ID NO: 127 - protein, 10 aa, Homo Sapiens
  sequence located in NPR2 OR ANPRB at 264-273 and may interact with Sequence 128 in this patent.
AGPTRATGRP

SEQ ID NO: 128 - protein, 10 aa, Homo Sapiens
  sequence located in COL16A1 at 1263-1272 and may interact with Sequence 127 in this patent.
GPPGSTGRPG

SEQ ID NO: 129 - protein, 10 aa, Homo Sapiens
  sequence located in NPR2 OR ANPRB at 265-274 and may interact with Sequence 130 in this patent.
GPTRATGRPW

SEQ ID NO: 130 - protein, 10 aa, Homo Sapiens
  sequence located in COL16A1 at 1262-1271 and may interact with Sequence 129 in this patent.
PGPPGSTGRP

SEQ ID NO: 131 - protein, 10 aa, Homo Sapiens
  sequence located in NPR2 OR ANPRB at 507-516 and may interact with Sequence 132 in this patent.
YHKGAGSRLT

SEQ ID NO: 132 - protein, 10 aa, Homo Sapiens
  sequence located in COL11A2 at 1584-1593 and may interact with Sequence 131 in this patent.
IMFTSAGSEG

SEQ ID NO: 133 - protein, 10 aa, Homo Sapiens
  sequence located in NPR2 OR ANPRB at 264-273 and may interact with Sequence 134 in this patent.
AGPTRATGRP

SEQ ID NO: 134 - protein, 10 aa, Homo Sapiens
  sequence located in COL5A3 at 2252-2261 and may interact with Sequence 133 in this patent.
GSGGARGAPG

SEQ ID NO: 135 - protein, 10 aa, Homo Sapiens
  sequence located in NPR2 OR ANPRB at 121-130 and may interact with Sequence 136 in this patent.
TAGAVASGFS

SEQ ID NO: 136 - protein, 10 aa, Homo Sapiens
  sequence located in COL5A3 at 539-548 and may interact with Sequence 135 in this patent.
SSAGYRAAEG

SEQ ID NO: 137 - protein, 10 aa, Homo Sapiens
  sequence located in NPR2 OR ANPRB at 713-722 and may interact with Sequence 138 in this patent.
ILQEIALRSG

SEQ ID NO: 138 - protein, 10 aa, Homo Sapiens
  sequence located in CDH12 at 444-453 and may interact with Sequence 137 in this patent.
NELLDRESTA

SEQ ID NO: 139 - protein, 10 aa, Homo Sapiens
  sequence located in NPR2 OR ANPRB at 264-273 and may interact with Sequence 140 in this patent.
AGPTRATGRP

SEQ ID NO: 140 - protein, 10 aa, Homo Sapiens
  sequence located in CACNA1F OR CACNAF1 at 1136-1145 and may interact with Sequence 139 in this patent.
WSSRRSSWSS

SEQ ID NO: 141 - protein, 10 aa, Homo Sapiens
  sequence located in NPR2 OR ANPRB at 264-273 and may interact with Sequence 142 in this patent.
AGPTRATGRP

SEQ ID NO: 142 - protein, 10 aa, Homo Sapiens
  sequence located in CACNA1F OR CACNAF1 at 1134-1143 and may interact with Sequence 141 in this patent.
GAWSSRRSSW

SEQ ID NO: 143 - protein, 10 aa, Homo Sapiens
  sequence located in NPR2 OR ANPRB at 263-272 and may interact with Sequence 144 in this patent.
RAGPTRATGR

SEQ ID NO: 144 - protein, 10 aa, Homo Sapiens
  sequence located in CACNA1F OR CACNAF1 at 1133-1142 and may interact with Sequence 143 in this patent.
SGAWSSRRSS

SEQ ID NO: 145 - protein, 10 aa, Homo Sapiens
  sequence located in NPR2 OR ANPRB at 10-19 and may interact with Sequence 146 in this patent.
VAALAGGVRP

SEQ ID NO: 146 - protein, 10 aa, Homo Sapiens
  sequence located in CD22 at 36-45 and may interact with Sequence 145 in this patent.
NSSQSTSNSG

SEQ ID NO: 147 - protein, 10 aa, Homo Sapiens
  sequence located in NPR2 OR ANPRB at 514-523 and may interact with Sequence 148 in this patent.
RLTLSLRGSS

SEQ ID NO: 148 - protein, 10 aa, Homo Sapiens
  sequence located in CD33 at 344-353 and may interact with Sequence 147 in this patent.
GTSPEAQGKA

SEQ ID NO: 149 - protein, 10 aa, Homo Sapiens
  sequence located in NPR2 OR ANPRB at 163-172 and may interact with Sequence 150 in this patent.
TARAALLYLD

SEQ ID NO: 150 - protein, 10 aa, Homo Sapiens
  sequence located in CENPE at 3137-3146 and may interact with Sequence 149 in this patent.
GGSRSQKVKV

SEQ ID NO: 151 - protein, 10 aa, Homo Sapiens
  sequence located in NPR2 OR ANPRB at 263-272 and may interact with Sequence 152 in this patent.
RAGPTRATGR

SEQ ID NO: 152 - protein, 10 aa, Homo Sapiens
  sequence located in CHD1 at 30-39 and may interact with Sequence 151 in this patent.
SGSGSSSGSS

SEQ ID NO: 153 - protein, 10 aa, Homo Sapiens
  sequence located in NPR2 OR ANPRB at 264-273 and may interact with Sequence 154 in this patent.
AGPTRATGRP

SEQ ID NO: 154 - protein, 10 aa, Homo Sapiens
  sequence located in CHD2 at 334-343 and may interact with Sequence 153 in this patent.
GSTSRSSRSR

SEQ ID NO: 155 - protein, 10 aa, Homo Sapiens
  sequence located in NPR2 OR ANPRB at 18-27 and may interact with Sequence 156 in this patent.
RPPGARNLTL

SEQ ID NO: 156 - protein, 10 aa, Homo Sapiens
  sequence located in KCNA5 at 553-562 and may interact with Sequence 155 in this patent.
QRKVSGSRGS

SEQ ID NO: 157 - protein, 10 aa, Homo Sapiens
  sequence located in NPR2 OR ANPRB at 263-272 and may interact with Sequence 158 in this patent.
RAGPTRATGR

SEQ ID NO: 158 - protein, 10 aa, Homo Sapiens
  sequence located in MMP15 at 7-16 and may interact with Sequence 157 in this patent.
APGRPGWTGS

SEQ ID NO: 159 - protein, 10 aa, Homo Sapiens
  sequence located in NPR2 OR ANPRB at 848-857 and may interact with Sequence 160 in this patent.
RGETVQAEAF

SEQ ID NO: 160 - protein, 10 aa, Homo Sapiens
  sequence located in CYP2C18 at 137-146 and may interact with Sequence 159 in this patent.
STLRNLGLGK

SEQ ID NO: 161 - protein, 10 aa, Homo Sapiens
  sequence located in NPR2 OR ANPRB at 263-272 and may interact with Sequence 162 in this patent.
RAGPTRATGR

SEQ ID NO: 162 - protein, 10 aa, Homo Sapiens
  sequence located in Unknown at 234-243 and may interact with Sequence 161 in this patent.
APRRPSGPGP

SEQ ID NO: 163 - protein, 10 aa, Homo Sapiens
  sequence located in NPR2 OR ANPRB at 264-273 and may interact with Sequence 164 in this patent.
AGPTRATGRP

SEQ ID NO: 164 - protein, 10 aa, Homo Sapiens
  sequence located in Unknown at 233-242 and may interact with Sequence 163 in this patent.
RAPRRPSGPG

SEQ ID NO: 165 - protein, 10 aa, Homo Sapiens
  sequence located in NPR2 OR ANPRB at 505-514 and may interact with Sequence 166 in this patent.
ERYHKGAGSR

SEQ ID NO: 166 - protein, 10 aa, Homo Sapiens
  sequence located in DMPK OR MDPK at 604-613 and may interact with Sequence 165 in this patent.
FAVVLSRAAA

SEQ ID NO: 167 - protein, 10 aa, Homo Sapiens
  sequence located in NPR2 OR ANPRB at 262-271 and may interact with Sequence 168 in this patent.
LRAGPTRATG

SEQ ID NO: 168 - protein, 10 aa, Homo Sapiens
  sequence located in POLG OR MDP1 at 780-789 and may interact with Sequence 167 in this patent.
QAGPGGASGP

SEQ ID NO: 169 - protein, 10 aa, Homo Sapiens
  sequence located in NPR2 OR ANPRB at 263-272 and may interact with Sequence 170 in this patent.
RAGPTRATGR

SEQ ID NO: 170 - protein, 10 aa, Homo Sapiens
  sequence located in POLZ OR REV3 OR REV3L at 1854-1863 and may interact with Sequence 169 in this patent.
SSPRSTSSPS

SEQ ID NO: 171 - protein, 10 aa, Homo Sapiens
  sequence located in NPR2 OR ANPRB at 936-945 and may interact with Sequence 172 in this patent.
ALLDAVSSFR

SEQ ID NO: 172 - protein, 10 aa, Homo Sapiens
  sequence located in DPYSL3 OR ULIP OR DRP3 at 352-361 and may interact with Sequence 171 in this patent.
PEGTNGVEER

SEQ ID NO: 173 - protein, 10 aa, Homo Sapiens
  sequence located in NPR2 OR ANPRB at 265-274 and may interact with Sequence 174 in this patent.
GPTRATGRPW

SEQ ID NO: 174 - protein, 10 aa, Homo Sapiens
  sequence located in EPHB4 OR HTK at 974-983 and may interact with Sequence 173 in this patent.
PGTPGGTGGP

SEQ ID NO: 175 - protein, 10 aa, Homo Sapiens
  sequence located in NPR2 OR ANPRB at 266-275 and may interact with Sequence 176 in this patent.
PTRATGRPWQ

SEQ ID NO: 176 - protein, 10 aa, Homo Sapiens
  sequence located in EWSR1 OR EWS at 616-625 and may interact with Sequence 175 in this patent.
GGPGGPPGPL

SEQ ID NO: 177 - protein, 10 aa, Homo Sapiens
  sequence located in NPR2 OR ANPRB at 514-523 and may interact with Sequence 178 in this patent.
RLTLSLRGSS

SEQ ID NO: 178 - protein, 10 aa, Homo Sapiens
  sequence located in FBLN1 at 116-125 and may interact with Sequence 177 in this patent.
GRAAQAQGQS

SEQ ID NO: 179 - protein, 10 aa, Homo Sapiens
  sequence located in NPR2 OR ANPRB at 514-523 and may interact with Sequence 180 in this patent.
RLTLSLRGSS

SEQ ID NO: 180 - protein, 10 aa, Homo Sapiens
  sequence located in FBLN1 at 116-125 and may interact with Sequence 179 in this patent.
GRAAQAQGQS

SEQ ID NO: 181 - protein, 10 aa, Homo Sapiens
  sequence located in NPR2 OR ANPRB at 514-523 and may interact with Sequence 182 in this patent.
RLTLSLRGSS

SEQ ID NO: 182 - protein, 10 aa, Homo Sapiens
  sequence located in FBLN1 at 116-125 and may interact with Sequence 181 in this patent.
GRAAQAQGQS

SEQ ID NO: 183 - protein, 10 aa, Homo Sapiens
  sequence located in NPR2 OR ANPRB at 510-519 and may interact with Sequence 184 in this patent.
GAGSRLTLSL

SEQ ID NO: 184 - protein, 10 aa, Homo Sapiens
  sequence located in FKBP2 OR FKBP13 at 20-29 and may interact with Sequence 183 in this patent.
ASTGTEGKRK

SEQ ID NO: 185 - protein, 10 aa, Homo Sapiens
  sequence located in NPR2 OR ANPRB at 263-272 and may interact with Sequence 186 in this patent.
RAGPTRATGR

SEQ ID NO: 186 - protein, 10 aa, Homo Sapiens
  sequence located in Unknown at 49-58 and may interact with Sequence 185 in this patent.
ASGGTSGSCS

SEQ ID NO: 187 - protein, 10 aa, Homo Sapiens
  sequence located in NPR2 OR ANPRB at 264-273 and may interact with Sequence 188 in this patent.
AGPTRATGRP

SEQ ID NO: 188 - protein, 10 aa, Homo Sapiens
  sequence located in Unknown at 48-57 and may interact with Sequence 187 in this patent.
GASGGTSGSC

SEQ ID NO: 189 - protein, 10 aa, Homo Sapiens
  sequence located in NPR2 OR ANPRB at 686-695 and may interact with Sequence 190 in this patent.
WTAPELLSGN

SEQ ID NO: 190 - protein, 10 aa, Homo Sapiens
  sequence located in MLL OR HRX OR ALL1 OR TRX1 OR HTRX at 3214-3223 and may interact with Sequence 189 in this patent.
PSSGLKKRPI

SEQ ID NO: 191 - protein, 10 aa, Homo Sapiens
  sequence located in NPR2 OR ANPRB at 264-273 and may interact with Sequence 192 in this patent.
AGPTRATGRP

SEQ ID NO: 192 - protein, 10 aa, Homo Sapiens
  sequence located in IL13RA2 OR IL13R at 53-62 and may interact with Sequence 191 in this patent.
GAPGGSSRSS

SEQ ID NO: 193 - protein, 10 aa, Homo Sapiens
  sequence located in NPR2 OR ANPRB at 265-274 and may interact with Sequence 194 in this patent.
GPTRATGRPW

SEQ ID NO: 194 - protein, 10 aa, Homo Sapiens
  sequence located in IL13RA2 OR IL13R at 52-61 and may interact with Sequence 193 in this patent.
PGAPGGSSRS

SEQ ID NO: 195 - protein, 10 aa, Homo Sapiens
  sequence located in NPR2 OR ANPRB at 266-275 and may interact with Sequence 196 in this patent.
PTRATGRPWQ

SEQ ID NO: 196 - protein, 10 aa, Homo Sapiens
  sequence located in INSM1 OR IA1 at 255-264 and may interact with Sequence 195 in this patent.
GRAGGAARPL

SEQ ID NO: 197 - protein, 10 aa, Homo Sapiens
  sequence located in NPR2 OR ANPRB at 119-128 and may interact with Sequence 198 in this patent.
LLTAGAVASG

SEQ ID NO: 198 - protein, 10 aa, Homo Sapiens
  sequence located in EIF4H OR WBSCR1 OR WSCR1 at 25-34 and may interact with Sequence 197 in this patent.
AGGHGSRSQK

SEQ ID NO: 199 - protein, 10 aa, Homo Sapiens
  sequence located in NPR2 OR ANPRB at 218-227 and may interact with Sequence 200 in this patent.
RANGRIVYIC

SEQ ID NO: 200 - protein, 10 aa, Homo Sapiens
  sequence located in IL1A at 112-121 and may interact with Sequence 199 in this patent.
AYVHDAPVRS

SEQ ID NO: 201 - protein, 10 aa, Homo Sapiens
  sequence located in NPR2 OR ANPRB at 260-269 and may interact with Sequence 202 in this patent.
ESLRAGPTRA

SEQ ID NO: 202 - protein, 10 aa, Homo Sapiens
  sequence located in PFKM at 247-256 and may interact with Sequence 201 in this patent.
LGETRSRGSR

SEQ ID NO: 203 - protein, 10 aa, Homo Sapiens
  sequence located in NPR2 OR ANPRB at 263-272 and may interact with Sequence 204 in this patent.
RAGPTRATGR

SEQ ID NO: 204 - protein, 10 aa, Homo Sapiens
  sequence located in CSF1R OR FMS at 928-937 and may interact with Sequence 203 in this patent.
SSSRSGGSGS

SEQ ID NO: 205 - protein, 10 aa, Homo Sapiens
  sequence located in NPR2 OR ANPRB at 263-272 and may interact with Sequence 206 in this patent.
RAGPTRATGR

SEQ ID NO: 206 - protein, 10 aa, Homo Sapiens
  sequence located in CSF1R OR FMS at 930-939 and may interact with Sequence 205 in this patent.
SRSGGSGSSS

SEQ ID NO: 207 - protein, 10 aa, Homo Sapiens
  sequence located in NPR2 OR ANPRB at 509-518 and may interact with Sequence 208 in this patent.
KGAGSRLTLS

SEQ ID NO: 208 - protein, 10 aa, Homo Sapiens
  sequence located in MKI67 at 3205-3214 and may interact with Sequence 207 in this patent.
TKSQPAASTL

SEQ ID NO: 209 - protein, 10 aa, Homo Sapiens
  sequence located in NPR2 OR ANPRB at 510-519 and may interact with Sequence 210 in this patent.
GAGSRLTLSL

SEQ ID NO: 210 - protein, 10 aa, Homo Sapiens
  sequence located in MKI67 at 3204-3213 and may interact with Sequence 209 in this patent.
KTKSQPAAST

SEQ ID NO: 211 - protein, 10 aa, Homo Sapiens
  sequence located in NPR2 OR ANPRB at 839-848 and may interact with Sequence 212 in this patent.
PHSVAEQLKR

SEQ ID NO: 212 - protein, 10 aa, Homo Sapiens
  sequence located in KIF4 at 249-258 and may interact with Sequence 211 in this patent.
GVRNRLLKFP

SEQ ID NO: 213 - protein, 10 aa, Homo Sapiens
  sequence located in NPR2 OR ANPRB at 512-521 and may interact with Sequence 214 in this patent.
GSRLTLSLRG

SEQ ID NO: 214 - protein, 10 aa, Homo Sapiens
  sequence located in ARAF1 at 419-428 and may interact with Sequence 213 in this patent.
PGPQRERKSS

SEQ ID NO: 215 - protein, 10 aa, Homo Sapiens
  sequence located in NPR2 OR ANPRB at 511-520 and may interact with Sequence 216 in this patent.
AGSRLTLSLR

SEQ ID NO: 216 - protein, 10 aa, Homo Sapiens
  sequence located in ARAF1 at 418-427 and may interact with Sequence 215 in this patent.
SPGPQRERKS

SEQ ID NO: 217 - protein, 10 aa, Homo Sapiens
  sequence located in NPR2 OR ANPRB at 916-925 and may interact with Sequence 218 in this patent.
SGLPGRNGQR

SEQ ID NO: 218 - protein, 10 aa, Homo Sapiens
  sequence located in Unknown at 11-20 and may interact with Sequence 217 in this patent.
SLPVTPGEPA

SEQ ID NO: 219 - protein, 10 aa, Homo Sapiens
  sequence located in NPR2 OR ANPRB at 916-925 and may interact with Sequence 220 in this patent.
SGLPGRNGQR

SEQ ID NO: 220 - protein, 10 aa, Homo Sapiens
  sequence located in Unknown at 10-19 and may interact with Sequence 219 in this patent.
SLPVTPGEPA

SEQ ID NO: 221 - protein, 10 aa, Homo Sapiens
  sequence located in NPR2 OR ANPRB at 916-925 and may interact with Sequence 222 in this patent.
SGLPGRNGQR

SEQ ID NO: 222 - protein, 10 aa, Homo Sapiens
  sequence located in Unknown at 14-23 and may interact with Sequence 221 in this patent.
SLPVTPGEPA

SEQ ID NO: 223 - protein, 10 aa, Homo Sapiens
  sequence located in NPR2 OR ANPRB at 263-272 and may interact with Sequence 224 in this patent.
RAGPTRATGR

SEQ ID NO: 224 - protein, 10 aa, Homo Sapiens
  sequence located in FACL2 OR LACS2 OR LACS at 65-74 and may interact with Sequence 223 in this patent.
AGSGGARRSA

SEQ ID NO: 225 - protein, 10 aa, Homo Sapiens
  sequence located in NPR2 OR ANPRB at 884-893 and may interact with Sequence 226 in this patent.
TLLNDLYTCF

SEQ ID NO: 226 - protein, 10 aa, Homo Sapiens
  sequence located in PNLIPRP1 OR PLRP1 at 336-345 and may interact with Sequence 225 in this patent.
RQEIIKIRAE

SEQ ID NO: 227 - protein, 10 aa, Homo Sapiens
  sequence located in NPR2 OR ANPRB at 787-796 and may interact with Sequence 228 in this patent.
RRFNKEGGTS

SEQ ID NO: 228 - protein, 10 aa, Homo Sapiens
  sequence located in LOR OR LRN at 752-761 and may interact with Sequence 227 in this patent.
GGSTLFVETS

SEQ ID NO: 229 - protein, 10 aa, Homo Sapiens
  sequence located in NPR2 OR ANPRB at 263-272 and may interact with Sequence 230 in this patent.
RAGPTRATGR

SEQ ID NO: 230 - protein, 10 aa, Homo Sapiens
  sequence located in MCP at 295-304 and may interact with Sequence 229 in this patent.
PASSASGPRP

SEQ ID NO: 231 - protein, 10 aa, Homo Sapiens
  sequence located in NPR2 OR ANPRB at 454-463 and may interact with Sequence 232 in this patent.
STLAIVALGT

SEQ ID NO: 232 - protein, 10 aa, Homo Sapiens
  sequence located in GRM2 OR MGLUR2 at 211-220 and may interact with Sequence 231 in this patent.
ASEGDYGETG

SEQ ID NO: 233 - protein, 10 aa, Homo Sapiens
  sequence located in NPR2 OR ANPRB at 453-462 and may interact with Sequence 234 in this patent.
LSTLAIVALG

SEQ ID NO: 234 - protein, 10 aa, Homo Sapiens
  sequence located in GRM2 OR MGLUR2 at 210-219 and may interact with Sequence 233 in this patent.
EASEGDYGET

SEQ ID NO: 235 - protein, 10 aa, Homo Sapiens
  sequence located in NPR2 OR ANPRB at 454-463 and may interact with Sequence 236 in this patent.
STLAIVALGT

SEQ ID NO: 236 - protein, 10 aa, Homo Sapiens
  sequence located in GRM8 OR MGLUR8 at 222-231 and may interact with Sequence 235 in this patent.
ASEGNYGESG

SEQ ID NO: 237 - protein, 10 aa, Homo Sapiens
  sequence located in NPR2 OR ANPRB at 687-696 and may interact with Sequence 238 in this patent.
TAPELLSGNP

SEQ ID NO: 238 - protein, 10 aa, Homo Sapiens
  sequence located in MTNR1B at 351-360 and may interact with Sequence 237 in this patent.
SRRLEQTSVR

SEQ ID NO: 239 - protein, 10 aa, Homo Sapiens
  sequence located in NPR2 OR ANPRB at 263-272 and may interact with Sequence 240 in this patent.
RAGPTRATGR

SEQ ID NO: 240 - protein, 10 aa, Homo Sapiens
  sequence located in MN1 at 887-896 and may interact with Sequence 239 in this patent.
PRTRRPSGTS

SEQ ID NO: 241 - protein, 10 aa, Homo Sapiens
  sequence located in NPR2 OR ANPRB at 121-130 and may interact with Sequence 242 in this patent.
TAGAVASGFS

SEQ ID NO: 242 - protein, 10 aa, Homo Sapiens
  sequence located in MSR1 at 324-333 and may interact with Sequence 241 in this patent.
GRPGNSGPKG

SEQ ID NO: 243 - protein, 10 aa, Homo Sapiens
  sequence located in NPR2 OR ANPRB at 262-271 and may interact with Sequence 244 in this patent.
LRAGPTRATG

SEQ ID NO: 244 - protein, 10 aa, Homo Sapiens
  sequence located in SLC12A2 OR NKCC1 at 1365-1374 and may interact with Sequence 243 in this patent.
SRSPSRSRSK

SEQ ID NO: 245 - protein, 10 aa, Homo Sapiens
  sequence located in NPR2 OR ANPRB at 511-520 and may interact with Sequence 246 in this patent.
AGSRLTLSLR

SEQ ID NO: 246 - protein, 10 aa, Homo Sapiens
  sequence located in SLC12A2 OR NKCC1 at 1370-1379 and may interact with Sequence 245 in this patent.
RSRSKSETKS

SEQ ID NO: 247 - protein, 10 aa, Homo Sapiens
  sequence located in NPR2 OR ANPRB at 510-519 and may interact with Sequence 248 in this patent.
GAGSRLTLSL

SEQ ID NO: 248 - protein, 10 aa, Homo Sapiens
  sequence located in SLC12A2 OR NKCC1 at 1369-1378 and may interact with Sequence 247 in this patent.
SRSRSKSETK

SEQ ID NO: 249 - protein, 10 aa, Homo Sapiens
  sequence located in NPR2 OR ANPRB at 138-147 and may interact with Sequence 250 in this patent.
TLVRTGPSAP

SEQ ID NO: 250 - protein, 10 aa, Homo Sapiens
  sequence located in GRIN1 OR NMDAR1 at 897-906 and may interact with Sequence 249 in this patent.
SKDTSTGGGR

SEQ ID NO: 251 - protein, 10 aa, Homo Sapiens
  sequence located in NPR2 OR ANPRB at 137-146 and may interact with Sequence 252 in this patent.
RTLVRTGPSA

SEQ ID NO: 252 - protein, 10 aa, Homo Sapiens
  sequence located in GRIN1 OR NMDAR1 at 896-905 and may interact with Sequence 251 in this patent.
SSKDTSTGGG

SEQ ID NO: 253 - protein, 10 aa, Homo Sapiens
  sequence located in NPR2 OR ANPRB at 825-834 and may interact with Sequence 254 in this patent.
EEKRKAEALL

SEQ ID NO: 254 - protein, 10 aa, Homo Sapiens
  sequence located in NOS3 at 13-22 and may interact with Sequence 253 in this patent.
KQCLCLTFLL

SEQ ID NO: 255 - protein, 10 aa, Homo Sapiens
  sequence located in NPR2 OR ANPRB at 263-272 and may interact with Sequence 256 in this patent.
RAGPTRATGR

SEQ ID NO: 256 - protein, 10 aa, Homo Sapiens
  sequence located in NAP1L1 OR NRP at 51-60 and may interact with Sequence 255 in this patent.
TSGSSSGSGS

SEQ ID NO: 257 - protein, 10 aa, Homo Sapiens
  sequence located in NPR2 OR ANPRB at 263-272 and may interact with Sequence 258 in this patent.
RAGPTRATGR

SEQ ID NO: 258 - protein, 10 aa, Homo Sapiens
  sequence located in OCRL at 440-449 and may interact with Sequence 257 in this patent.
PSSGGTSSSP

SEQ ID NO: 259 - protein, 10 aa, Homo Sapiens
  sequence located in NPR2 OR ANPRB at 263-272 and may interact with Sequence 260 in this patent.
RAGPTRATGR

SEQ ID NO: 260 - protein, 10 aa, Homo Sapiens
  sequence located in OSBP at 75-84 and may interact with Sequence 259 in this patent.
PTGGSGGSGA

SEQ ID NO: 261 - protein, 10 aa, Homo Sapiens
  sequence located in NPR2 OR ANPRB at 639-648 and may interact with Sequence 262 in this patent.
ISSHGSLKSS

SEQ ID NO: 262 - protein, 10 aa, Homo Sapiens
  sequence located in PIK3CG at 76-85 and may interact with Sequence 261 in this patent.
RALETSVAAD

SEQ ID NO: 263 - protein, 10 aa, Homo Sapiens
  sequence located in NPR2 OR ANPRB at 123-132 and may interact with Sequence 264 in this patent.
GAVASGFSAK

SEQ ID NO: 264 - protein, 10 aa, Homo Sapiens
  sequence located in PECAM1 at 726-735 and may interact with Sequence 263 in this patent.
SRYSRTEGSL

SEQ ID NO: 265 - protein, 10 aa, Homo Sapiens
  sequence located in NPR2 OR ANPRB at 14-23 and may interact with Sequence 266 in this patent.
AGGVRPPGAR

SEQ ID NO: 266 - protein, 10 aa, Homo Sapiens
  sequence located in PLCB3 at 473-482 and may interact with Sequence 265 in this patent.
PSAGGPDSAG

SEQ ID NO: 267 - protein, 10 aa, Homo Sapiens
  sequence located in NPR2 OR ANPRB at 263-272 and may interact with Sequence 268 in this patent.
RAGPTRATGR

SEQ ID NO: 268 - protein, 10 aa, Homo Sapiens
  sequence located in PKD1 at 4255-4264 and may interact with Sequence 267 in this patent.
PAGSSRGPSP

SEQ ID NO: 269 - protein, 10 aa, Homo Sapiens
  sequence located in NPR2 OR ANPRB at 199-208 and may interact with Sequence 270 in this patent.
QHQVYAREPG

SEQ ID NO: 270 - protein, 10 aa, Homo Sapiens
  sequence located in PTPN7 at 48-57 and may interact with Sequence 269 in this patent.
LMLDVRSLGA

SEQ ID NO: 271 - protein, 10 aa, Homo Sapiens
  sequence located in NPR2 OR ANPRB at 265-274 and may interact with Sequence 272 in this patent.
GPTRATGRPW

SEQ ID NO: 272 - protein, 10 aa, Homo Sapiens
  sequence located in RGS12 at 1275-1284 and may interact with Sequence 271 in this patent.
PGSASSPPGP

SEQ ID NO: 273 - protein, 10 aa, Homo Sapiens
  sequence located in NPR2 OR ANPRB at 264-273 and may interact with Sequence 274 in this patent.
AGPTRATGRP

SEQ ID NO: 274 - protein, 10 aa, Homo Sapiens
  sequence located in RGS12 at 1274-1283 and may interact with Sequence 273 in this patent.
SPGSASSPPG

SEQ ID NO: 275 - protein, 10 aa, Homo Sapiens
  sequence located in NPR2 OR ANPRB at 263-272 and may interact with Sequence 276 in this patent.
RAGPTRATGR

SEQ ID NO: 276 - protein, 10 aa, Homo Sapiens
  sequence located in RGS12 at 1273-1282 and may interact with Sequence 275 in this patent.
TSPGSASSPP

SEQ ID NO: 277 - protein, 10 aa, Homo Sapiens
  sequence located in NPR2 OR ANPRB at 511-520 and may interact with Sequence 278 in this patent.
AGSRLTLSLR

SEQ ID NO: 278 - protein, 10 aa, Homo Sapiens
  sequence located in RGS13 at 139-148 and may interact with Sequence 277 in this patent.
TEGESESRPG

SEQ ID NO: 279 - protein, 10 aa, Homo Sapiens
  sequence located in NPR2 OR ANPRB at 512-521 and may interact with Sequence 280 in this patent.
GSRLTLSLRG

SEQ ID NO: 280 - protein, 10 aa, Homo Sapiens
  sequence located in RGS13 at 138-147 and may interact with Sequence 279 in this patent.
STEGESESRP

SEQ ID NO: 281 - protein, 10 aa, Homo Sapiens
  sequence located in NPR2 OR ANPRB at 513-522 and may interact with Sequence 282 in this patent.
SRLTLSLRGS

SEQ ID NO: 282 - protein, 10 aa, Homo Sapiens
  sequence located in RGS13 at 137-146 and may interact with Sequence 281 in this patent.
GSTEGESESR

SEQ ID NO: 283 - protein, 10 aa, Homo Sapiens
  sequence located in NPR2 OR ANPRB at 263-272 and may interact with Sequence 284 in this patent.
RAGPTRATGR

SEQ ID NO: 284 - protein, 10 aa, Homo Sapiens
  sequence located in RIL at 114-123 and may interact with Sequence 283 in this patent.
TSRRPSGTGT

SEQ ID NO: 285 - protein, 10 aa, Homo Sapiens
  sequence located in NPR2 OR ANPRB at 264-273 and may interact with Sequence 286 in this patent.
AGPTRATGRP

SEQ ID NO: 286 - protein, 10 aa, Homo Sapiens
  sequence located in SET at 226-235 and may interact with Sequence 285 in this patent.
SPRRSRGSPR

SEQ ID NO: 287 - protein, 10 aa, Homo Sapiens
  sequence located in NPR2 OR ANPRB at 263-272 and may interact with Sequence 288 in this patent.
RAGPTRATGR

SEQ ID NO: 288 - protein, 10 aa, Homo Sapiens
  sequence located in SFRS3 OR SRP20 OR X16 at 479-488 and may interact with Sequence 287 in this patent.
ASRSPSRSRS

SEQ ID NO: 289 - protein, 10 aa, Homo Sapiens
  sequence located in NPR2 OR ANPRB at 263-272 and may interact with Sequence 290 in this patent.
RAGPTRATGR

SEQ ID NO: 290 - protein, 10 aa, Homo Sapiens
  sequence located in SFRS3 OR SRP20 OR X16 at 474-483 and may interact with Sequence 289 in this patent.
SRSRSASRSP

SEQ ID NO: 291 - protein, 10 aa, Homo Sapiens
  sequence located in NPR2 OR ANPRB at 262-271 and may interact with Sequence 292 in this patent.
LRAGPTRATG

SEQ ID NO: 292 - protein, 10 aa, Homo Sapiens
  sequence located in SFRS3 OR SRP20 OR X16 at 473-482 and may interact with Sequence 291 in this patent.
KSRSRSASRS

SEQ ID NO: 293 - protein, 10 aa, Homo Sapiens
  sequence located in NPR2 OR ANPRB at 258-267 and may interact with Sequence 294 in this patent.
FGESLRAGPT

SEQ ID NO: 294 - protein, 10 aa, Homo Sapiens
  sequence located in SFRS3 OR SRP20 OR X16 at 325-334 and may interact with Sequence 293 in this patent.
KSLRQSRSRS

SEQ ID NO: 295 - protein, 10 aa, Homo Sapiens
  sequence located in NPR2 OR ANPRB at 104-113 and may interact with Sequence 296 in this patent.
PAASVARFAS

SEQ ID NO: 296 - protein, 10 aa, Homo Sapiens
  sequence located in SFRS8 OR SWAP at 810-819 and may interact with Sequence 295 in this patent.
RRRAHSPERR

SEQ ID NO: 297 - protein, 10 aa, Homo Sapiens
  sequence located in NPR2 OR ANPRB at 560-569 and may interact with Sequence 298 in this patent.
LTRQVLFELK

SEQ ID NO: 298 - protein, 10 aa, Homo Sapiens
  sequence located in SKI at 584-593 and may interact with Sequence 297 in this patent.
KRSLHQELEF

SEQ ID NO: 299 - protein, 10 aa, Homo Sapiens
  sequence located in NPR2 OR ANPRB at 264-273 and may interact with Sequence 300 in this patent.
AGPTRATGRP

SEQ ID NO: 300 - protein, 10 aa, Homo Sapiens
  sequence located in SMOH at 40-49 and may interact with Sequence 299 in this patent.
GPRSAGGSAR

SEQ ID NO: 301 - protein, 10 aa, Homo Sapiens
  sequence located in NPR2 OR ANPRB at 263-272 and may interact with Sequence 302 in this patent.
RAGPTRATGR

SEQ ID NO: 302 - protein, 10 aa, Homo Sapiens
  sequence located in SMOH at 39-48 and may interact with Sequence 301 in this patent.
PGPRSAGGSA

SEQ ID NO: 303 - protein, 10 aa, Homo Sapiens
  sequence located in NPR2 OR ANPRB at 511-520 and may interact with Sequence 304 in this patent.
AGSRLTLSLR

SEQ ID NO: 304 - protein, 10 aa, Homo Sapiens
  sequence located in SNO at 486-495 and may interact with Sequence 303 in this patent.
SKRKSESATC

SEQ ID NO: 305 - protein, 10 aa, Homo Sapiens
  sequence located in NPR2 OR ANPRB at 512-521 and may interact with Sequence 306 in this patent.
GSRLTLSLRG

SEQ ID NO: 306 - protein, 10 aa, Homo Sapiens
  sequence located in SNO at 485-494 and may interact with Sequence 305 in this patent.
TSKRKSESAT

SEQ ID NO: 307 - protein, 10 aa, Homo Sapiens
  sequence located in NPR2 OR ANPRB at 664-673 and may interact with Sequence 308 in this patent.
GLASFRSTAE

SEQ ID NO: 308 - protein, 10 aa, Homo Sapiens
  sequence located in GH2 at 815-824 and may interact with Sequence 307 in this patent.
LRSRSKRSKS

SEQ ID NO: 309 - protein, 10 aa, Homo Sapiens
  sequence located in NPR2 OR ANPRB at 14-23 and may interact with Sequence 310 in this patent.
AGGVRPPGAR

SEQ ID NO: 310 - protein, 10 aa, Homo Sapiens
  sequence located in SRC OR SRC1 at 54-63 and may interact with Sequence 309 in this patent.
SGAGGTDPAS

SEQ ID NO: 311 - protein, 10 aa, Homo Sapiens
  sequence located in NPR2 OR ANPRB at 263-272 and may interact with Sequence 312 in this patent.
RAGPTRATGR

SEQ ID NO: 312 - protein, 10 aa, Homo Sapiens
  sequence located in SREBF2 OR SREBP2 at 62-71 and may interact with Sequence 311 in this patent.
SSSGSSGSSS

SEQ ID NO: 313 - protein, 10 aa, Homo Sapiens
  sequence located in NPR2 OR ANPRB at 264-273 and may interact with Sequence 314 in this patent.
AGPTRATGRP

SEQ ID NO: 314 - protein, 10 aa, Homo Sapiens
  sequence located in SREBF2 OR SREBP2 at 61-70 and may interact with Sequence 313 in this patent.
GSSSGSSGSS

SEQ ID NO: 315 - protein, 10 aa, Homo Sapiens
  sequence located in NPR2 OR ANPRB at 264-273 and may interact with Sequence 316 in this patent.
AGPTRATGRP

SEQ ID NO: 316 - protein, 10 aa, Homo Sapiens
  sequence located in SREBF2 OR SREBP2 at 59-68 and may interact with Sequence 315 in this patent.
GSGSSSGSSG

SEQ ID NO: 317 - protein, 10 aa, Homo Sapiens
  sequence located in NPR2 OR ANPRB at 264-273 and may interact with Sequence 318 in this patent.
AGPTRATGRP

SEQ ID NO: 318 - protein, 10 aa, Homo Sapiens
  sequence located in SREBF2 OR SREBP2 at 56-65 and may interact with Sequence 317 in this patent.
GSGGSGSSSG

SEQ ID NO: 319 - protein, 10 aa, Homo Sapiens
  sequence located in NPR2 OR ANPRB at 263-272 and may interact with Sequence 320 in this patent.
RAGPTRATGR

SEQ ID NO: 320 - protein, 10 aa, Homo Sapiens
  sequence located in SREBF2 OR SREBP2 at 62-71 and may interact with Sequence 319 in this patent.
SSSGSSGSSS

SEQ ID NO: 321 - protein, 10 aa, Homo Sapiens
  sequence located in NPR2 OR ANPRB at 263-272 and may interact with Sequence 322 in this patent.
RAGPTRATGR

SEQ ID NO: 322 - protein, 10 aa, Homo Sapiens
  sequence located in SREBF2 OR SREBP2 at 55-64 and may interact with Sequence 321 in this patent.
PGSGGSGSSS

SEQ ID NO: 323 - protein, 10 aa, Homo Sapiens
  sequence located in NPR2 OR ANPRB at 264-273 and may interact with Sequence 324 in this patent.
AGPTRATGRP

SEQ ID NO: 324 - protein, 10 aa, Homo Sapiens
  sequence located in SOX11 at 346-355 and may interact with Sequence 323 in this patent.
SSGSSSGSSG

SEQ ID NO: 325 - protein, 10 aa, Homo Sapiens
  sequence located in NPR2 OR ANPRB at 263-272 and may interact with Sequence 326 in this patent.
RAGPTRATGR

SEQ ID NO: 326 - protein, 10 aa, Homo Sapiens
  sequence located in SOX11 at 345-354 and may interact with Sequence 325 in this patent.
SSSGSSSGSS

SEQ ID NO: 327 - protein, 10 aa, Homo Sapiens
  sequence located in NPR2 OR ANPRB at 60-69 and may interact with Sequence 328 in this patent.
LPVDLRFVSS

SEQ ID NO: 328 - protein, 10 aa, Homo Sapiens
  sequence located in SYT5 at 158-167 and may interact with Sequence 327 in this patent.
RRYETKVHRQ

SEQ ID NO: 329 - protein, 10 aa, Homo Sapiens
  sequence located in NPR2 OR ANPRB at 510-519 and may interact with Sequence 330 in this patent.
GAGSRLTLSL

SEQ ID NO: 330 - protein, 10 aa, Homo Sapiens
  sequence located in TCOF1 at 1305-1314 and may interact with Sequence 329 in this patent.
TSTTSKGKAK

SEQ ID NO: 331 - protein, 10 aa, Homo Sapiens
  sequence located in NPR2 OR ANPRB at 263-272 and may interact with Sequence 332 in this patent.
RAGPTRATGR

SEQ ID NO: 332 - protein, 10 aa, Homo Sapiens
  sequence located in TCF3 OR E2A OR ITF1 at 94-103 and may interact with Sequence 331 in this patent.
ASSSAGGSRT

SEQ ID NO: 333 - protein, 10 aa, Homo Sapiens
  sequence located in NPR2 OR ANPRB at 264-273 and may interact with Sequence 334 in this patent.
AGPTRATGRP

SEQ ID NO: 334 - protein, 10 aa, Homo Sapiens
  sequence located in TMPO at 249-258 and may interact with Sequence 333 in this patent.
STRGSRRTPR

SEQ ID NO: 335 - protein, 10 aa, Homo Sapiens
  sequence located in NPR2 OR ANPRB at 263-272 and may interact with Sequence 336 in this patent.
RAGPTRATGR

SEQ ID NO: 336 - protein, 10 aa, Homo Sapiens
  sequence located in Unknown at 741-750 and may interact with Sequence 335 in this patent.
ARAGGTSSPS

SEQ ID NO: 337 - protein, 10 aa, Homo Sapiens
  sequence located in NPR2 OR ANPRB at 750-759 and may interact with Sequence 338 in this patent.
PSIDRTQLNE

SEQ ID NO: 338 - protein, 10 aa, Homo Sapiens
  sequence located in F8VWF OR VWF at 509-518 and may interact with Sequence 337 in this patent.
LVKLSPVYAG

SEQ ID NO: 339 - protein, 10 aa, Homo Sapiens
  sequence located in NPR2 OR ANPRB at 751-760 and may interact with Sequence 340 in this patent.
SIDRTQLNEE

SEQ ID NO: 340 - protein, 10 aa, Homo Sapiens
  sequence located in F8VWF OR VWF at 508-517 and may interact with Sequence 339 in this patent.
LLVKLSPVYA

SEQ ID NO: 341 - protein, 10 aa, Homo Sapiens
  sequence located in NPR2 OR ANPRB at 263-272 and may interact with Sequence 342 in this patent.
RAGPTRATGR

SEQ ID NO: 342 - protein, 10 aa, Homo Sapiens
  sequence located in KIAA0218 at 42-51 and may interact with Sequence 341 in this patent.
SASRSGGPSS

SEQ ID NO: 343 - protein, 10 aa, Homo Sapiens
  sequence located in NPR2 OR ANPRB at 264-273 and may interact with Sequence 344 in this patent.
AGPTRATGRP

SEQ ID NO: 344 - protein, 10 aa, Homo Sapiens
  sequence located in KIAA0218 at 41-50 and may interact with Sequence 343 in this patent.
RSASRSGGPS

SEQ ID NO: 345 - protein, 10 aa, Homo Sapiens
  sequence located in NPR2 OR ANPRB at 510-519 and may interact with Sequence 346 in this patent.
GAGSRLTLSL

SEQ ID NO: 346 - protein, 10 aa, Homo Sapiens
  sequence located in KIAA0218 at 201-210 and may interact with Sequence 345 in this patent.
KRKGEAATRA

SEQ ID NO: 347 - protein, 10 aa, Homo Sapiens
  sequence located in NPR2 OR ANPRB at 511-520 and may interact with Sequence 348 in this patent.
AGSRLTLSLR

SEQ ID NO: 348 - protein, 10 aa, Homo Sapiens
  sequence located in KIAA0218 at 200-209 and may interact with Sequence 347 in this patent.
PKRKGEAATR

SEQ ID NO: 349 - protein, 10 aa, Homo Sapiens
  sequence located in NPR2 OR ANPRB at 514-523 and may interact with Sequence 350 in this patent.
RLTLSLRGSS

SEQ ID NO: 350 - protein, 10 aa, Homo Sapiens
  sequence located in KIAA0218 at 200-209 and may interact with Sequence 349 in this patent.
PKRKGEAATR

SEQ ID NO: 351 - protein, 10 aa, Homo Sapiens
  sequence located in NPR2 OR ANPRB at 934-943 and may interact with Sequence 352 in this patent.
ALALLDAVSS

SEQ ID NO: 352 - protein, 10 aa, Homo Sapiens
  sequence located in ZNF75 at 155-164 and may interact with Sequence 351 in this patent.
GKGQQVGDRA

SEQ ID NO: 353 - protein, 10 aa, Homo Sapiens
  sequence located in NPR3 OR ANPRC at 16-25 and may interact with Sequence 354 in this patent.
GWALLAGGTG

SEQ ID NO: 354 - protein, 10 aa, Homo Sapiens
  sequence located in COL1A1 at 1123-1132 and may interact with Sequence 353 in this patent.
PGSPGEQGPS

SEQ ID NO: 355 - protein, 10 aa, Homo Sapiens
  sequence located in NPR3 OR ANPRC at 17-26 and may interact with Sequence 356 in this patent.
WALLAGGTGG

SEQ ID NO: 356 - protein, 10 aa, Homo Sapiens
  sequence located in COL1A1 at 1122-1131 and may interact with Sequence 355 in this patent.
PPGSPGEQGP

SEQ ID NO: 357 - protein, 10 aa, Homo Sapiens
  sequence located in NPR3 OR ANPRC at 17-26 and may interact with Sequence 358 in this patent.
WALLAGGTGG

SEQ ID NO: 358 - protein, 10 aa, Homo Sapiens
  sequence located in COL1A1 at 1126-1135 and may interact with Sequence 357 in this patent.
PGEQGPSGAS

SEQ ID NO: 359 - protein, 10 aa, Homo Sapiens
  sequence located in NPR3 OR ANPRC at 17-26 and may interact with Sequence 360 in this patent.
WALLAGGTGG

SEQ ID NO: 360 - protein, 10 aa, Homo Sapiens
  sequence located in COL1A1 at 982-991 and may interact with Sequence 359 in this patent.
PGKQGPSGAS

SEQ ID NO: 361 - protein, 10 aa, Homo Sapiens
  sequence located in NPR3 OR ANPRC at 16-25 and may interact with Sequence 362 in this patent.
GWALLAGGTG

SEQ ID NO: 362 - protein, 10 aa, Homo Sapiens
  sequence located in COL1A1 at 1125-1134 and may interact with Sequence 361 in this patent.
SPGEQGPSGA

SEQ ID NO: 363 - protein, 10 aa, Homo Sapiens
  sequence located in NPR3 OR ANPRC at 17-26 and may interact with Sequence 364 in this patent.
WALLAGGTGG

SEQ ID NO: 364 - protein, 10 aa, Homo Sapiens
  sequence located in COL9A1 at 271-280 and may interact with Sequence 363 in this patent.
PGEQGPPGAS

SEQ ID NO: 365 - protein, 10 aa, Homo Sapiens
  sequence located in NPR3 OR ANPRC at 16-25 and may interact with Sequence 366 in this patent.
GWALLAGGTG

SEQ ID NO: 366 - protein, 10 aa, Homo Sapiens
  sequence located in COL9A1 at 270-279 and may interact with Sequence 365 in this patent.
PPGEQGPPGA

SEQ ID NO: 367 - protein, 10 aa, Homo Sapiens
  sequence located in NPR3 OR ANPRC at 16-25 and may interact with Sequence 368 in this patent.
GWALLAGGTG

SEQ ID NO: 368 - protein, 10 aa, Homo Sapiens
  sequence located in COL11A2 at 797-806 and may interact with Sequence 367 in this patent.
PGPPGEQGPP

SEQ ID NO: 369 - protein, 10 aa, Homo Sapiens
  sequence located in NPR3 OR ANPRC at 18-27 and may interact with Sequence 370 in this patent.
ALLAGGTGGG

SEQ ID NO: 370 - protein, 10 aa, Homo Sapiens
  sequence located in CDC27 at 311-320 and may interact with Sequence 369 in this patent.
PSTGAPSKKS

SEQ ID NO: 371 - protein, 10 aa, Homo Sapiens
  sequence located in NPR3 OR ANPRC at 66-75 and may interact with Sequence 372 in this patent.
LFSLTRVRPA

SEQ ID NO: 372 - protein, 10 aa, Homo Sapiens
  sequence located in CHD2 at 263-272 and may interact with Sequence 371 in this patent.
KEGKGPNARR

SEQ ID NO: 373 - protein, 10 aa, Homo Sapiens
  sequence located in NPR3 OR ANPRC at 89-98 and may interact with Sequence 374 in this patent.
GRRLLPPGTR

SEQ ID NO: 374 - protein, 10 aa, Homo Sapiens
  sequence located in CTRL OR CTRL1 at 595-604 and may interact with Sequence 373 in this patent.
PSSRRKESST

SEQ ID NO: 375 - protein, 10 aa, Homo Sapiens
  sequence located in NPR3 OR ANPRC at 33-42 and may interact with Sequence 376 in this patent.
GGGAGIGGGR

SEQ ID NO: 376 - protein, 10 aa, Homo Sapiens
  sequence located in DAG1 at 435-444 and may interact with Sequence 375 in this patent.
ATPSTDSTTT

SEQ ID NO: 377 - protein, 10 aa, Homo Sapiens
  sequence located in NPR3 OR ANPRC at 87-96 and may interact with Sequence 378 in this patent.
GTGRRLLPPG

SEQ ID NO: 378 - protein, 10 aa, Homo Sapiens
  sequence located in DSG1 at 504-513 and may interact with Sequence 377 in this patent.
TGRQESTSST

SEQ ID NO: 379 - protein, 10 aa, Homo Sapiens
  sequence located in NPR3 OR ANPRC at 33-42 and may interact with Sequence 380 in this patent.
GGGAGIGGGR

SEQ ID NO: 380 - protein, 10 aa, Homo Sapiens
  sequence located in E2F4 at 325-334 and may interact with Sequence 379 in this patent.
SSSGPNPSTS

SEQ ID NO: 381 - protein, 10 aa, Homo Sapiens
  sequence located in NPR3 OR ANPRC at 83-92 and may interact with Sequence 382 in this patent.
VEGNGTGRRL

SEQ ID NO: 382 - protein, 10 aa, Homo Sapiens
  sequence located in ECM1 at 13-22 and may interact with Sequence 381 in this patent.
YLAVASAASE

SEQ ID NO: 383 - protein, 10 aa, Homo Sapiens
  sequence located in NPR3 OR ANPRC at 82-91 and may interact with Sequence 384 in this patent.
SVEGNGTGRR

SEQ ID NO: 384 - protein, 10 aa, Homo Sapiens
  sequence located in ECM1 at 12-21 and may interact with Sequence 383 in this patent.
TYLAVASAAS

SEQ ID NO: 385 - protein, 10 aa, Homo Sapiens
  sequence located in NPR3 OR ANPRC at 118-127 and may interact with Sequence 386 in this patent.
DRVAAARGAK

SEQ ID NO: 386 - protein, 10 aa, Homo Sapiens
  sequence located in Unknown at 18-27 and may interact with Sequence 385 in this patent.
IPHSSGSSRL

SEQ ID NO: 387 - protein, 10 aa, Homo Sapiens
  sequence located in NPR3 OR ANPRC at 18-27 and may interact with Sequence 388 in this patent.
ALLAGGTGGG

SEQ ID NO: 388 - protein, 10 aa, Homo Sapiens
  sequence located in Unknown at 95-104 and may interact with Sequence 387 in this patent.
PSASPASEKS

SEQ ID NO: 389 - protein, 10 aa, Homo Sapiens
  sequence located in NPR3 OR ANPRC at 34-43 and may interact with Sequence 390 in this patent.
GGAGIGGGRQ

SEQ ID NO: 390 - protein, 10 aa, Homo Sapiens
  sequence located in IFI16 OR IFNGIP1 at 173-182 and may interact with Sequence 389 in this patent.
LSAPPNSSST

SEQ ID NO: 391 - protein, 10 aa, Homo Sapiens
  sequence located in NPR3 OR ANPRC at 401-410 and may interact with Sequence 392 in this patent.
AGQVSIDANG

SEQ ID NO: 392 - protein, 10 aa, Homo Sapiens
  sequence located in ITPKB at 1709-1718 and may interact with Sequence 391 in this patent.
SIGVNGHLSG

SEQ ID NO: 393 - protein, 10 aa, Homo Sapiens
  sequence located in NPR3 OR ANPRC at 405-414 and may interact with Sequence 394 in this patent.
SIDANGDRYG

SEQ ID NO: 394 - protein, 10 aa, Homo Sapiens
  sequence located in PRKCM at 558-567 and may interact with Sequence 393 in this patent.
RDISVSISVS

SEQ ID NO: 395 - protein, 10 aa, Homo Sapiens
  sequence located in NPR3 OR ANPRC at 404-413 and may interact with Sequence 396 in this patent.
VSIDANGDRY

SEQ ID NO: 396 - protein, 10 aa, Homo Sapiens
  sequence located in PRKCM at 557-566 and may interact with Sequence 395 in this patent.
HRDISVSISV

SEQ ID NO: 397 - protein, 10 aa, Homo Sapiens
  sequence located in NPR3 OR ANPRC at 403-412 and may interact with Sequence 398 in this patent.
QVSIDANGDR

SEQ ID NO: 398 - protein, 10 aa, Homo Sapiens
  sequence located in PRKCM at 556-565 and may interact with Sequence 397 in this patent.
LHRDISVSIS

SEQ ID NO: 399 - protein, 10 aa, Homo Sapiens
  sequence located in NPR3 OR ANPRC at 82-91 and may interact with Sequence 400 in this patent.
SVEGNGTGRR

SEQ ID NO: 400 - protein, 10 aa, Homo Sapiens
  sequence located in ARAF1 at 106-115 and may interact with Sequence 399 in this patent.
TDFSVSSSAS

SEQ ID NO: 401 - protein, 10 aa, Homo Sapiens
  sequence located in NPR3 OR ANPRC at 114-123 and may interact with Sequence 402 in this patent.
FSLVDRVAAA

SEQ ID NO: 402 - protein, 10 aa, Homo Sapiens
  sequence located in ADAM8 OR MS2 at 149-158 and may interact with Sequence 401 in this patent.
GGRHAVYQAE

SEQ ID NO: 403 - protein, 10 aa, Homo Sapiens
  sequence located in NPR3 OR ANPRC at 33-42 and may interact with Sequence 404 in this patent.
GGGAGIGGGR

SEQ ID NO: 404 - protein, 10 aa, Homo Sapiens
  sequence located in Unknown at 351-360 and may interact with Sequence 403 in this patent.
AAASANPAAA

SEQ ID NO: 405 - protein, 10 aa, Homo Sapiens
  sequence located in NPR3 OR ANPRC at 83-92 and may interact with Sequence 406 in this patent.
VEGNGTGRRL

SEQ ID NO: 406 - protein, 10 aa, Homo Sapiens
  sequence located in SLC6A6 at 62-71 and may interact with Sequence 405 in this patent.
KPATSTITLY

SEQ ID NO: 407 - protein, 10 aa, Homo Sapiens
  sequence located in NPR3 OR ANPRC at 16-25 and may interact with Sequence 408 in this patent.
GWALLAGGTG

SEQ ID NO: 408 - protein, 10 aa, Homo Sapiens
  sequence located in RGS12 at 1289-1298 and may interact with Sequence 407 in this patent.
PPGQKSPSGP

SEQ ID NO: 409 - protein, 10 aa, Homo Sapiens
  sequence located in NPR3 OR ANPRC at 33-42 and may interact with Sequence 410 in this patent.
GGGAGIGGGR

SEQ ID NO: 410 - protein, 10 aa, Homo Sapiens
  sequence located in SSTR1 at 20-29 and may interact with Sequence 409 in this patent.
PSAANASSAP

SEQ ID NO: 411 - protein, 10 aa, Homo Sapiens
  sequence located in NPR3 OR ANPRC at 87-96 and may interact with Sequence 412 in this patent.
GTGRRLLPPG

SEQ ID NO: 412 - protein, 10 aa, Homo Sapiens
  sequence located in TCOF1 at 1183-1192 and may interact with Sequence 411 in this patent.
TGGKEAASGT

SEQ ID NO: 413 - protein, 10 aa, Homo Sapiens
  sequence located in NPR3 OR ANPRC at 18-27 and may interact with Sequence 414 in this patent.
ALLAGGTGGG

SEQ ID NO: 414 - protein, 10 aa, Homo Sapiens
  sequence located in TEF at 88-97 and may interact with Sequence 413 in this patent.
GKESASSSTA

SEQ ID NO: 415 - protein, 10 aa, Homo Sapiens
  sequence located in NPR3 OR ANPRC at 33-42 and may interact with Sequence 416 in this patent.
GGGAGIGGGR

SEQ ID NO: 416 - protein, 10 aa, Homo Sapiens
  sequence located in XE169 OR SMCX at 1221-1230 and may interact with Sequence 415 in this patent.
SSPRPNPTSS

SEQ ID NO: 417 - protein, 10 aa, Homo Sapiens
  sequence located in NPR3 OR ANPRC at 141-150 and may interact with Sequence 418 in this patent.
APVARLASHW

SEQ ID NO: 418 - protein, 10 aa, Homo Sapiens
  sequence located in KIAA0166 at 258-267 and may interact with Sequence 417 in this patent.
PVAGQASNGG

SEQ ID NO: 419 - protein, 10 aa, Homo Sapiens
  sequence located in NPR3 OR ANPRC at 33-42 and may interact with Sequence 420 in this patent.
GGGAGIGGGR

SEQ ID NO: 420 - protein, 10 aa, Homo Sapiens
  sequence located in ZNF157 at 142-151 and may interact with Sequence 419 in this patent.
SSSGTNPSSS

SEQ ID NO: 421 - protein, 10 aa, Homo Sapiens
  sequence located in NPR3 OR ANPRC at 117-126 and may interact with Sequence 422 in this patent.
VDRVAAARGA

SEQ ID NO: 422 - protein, 10 aa, Homo Sapiens
  sequence located in AZGP1 OR ZAG at 1569-1578 and may interact with Sequence 421 in this patent.
GPSCSSNPVH

SEQ ID NO: 423 - protein, 10 aa, Homo Sapiens
  sequence located in ANX1 OR LPC1 at 208-217 and may interact with Sequence 424 in this patent.
AGERRKGTDV

SEQ ID NO: 424 - protein, 10 aa, Homo Sapiens
  sequence located in BACH1 at 451-460 and may interact with Sequence 423 in this patent.
RTFTTLSSVN

SEQ ID NO: 425 - protein, 10 aa, Homo Sapiens
  sequence located in ANX1 OR LPC1 at 69-78 and may interact with Sequence 426 in this patent.
TKRNNAQRQQ

SEQ ID NO: 426 - protein, 10 aa, Homo Sapiens
  sequence located in BDKRB2 OR BKR2 at 234-243 and may interact with Sequence 425 in this patent.
LLPLSVITFC

SEQ ID NO: 427 - protein, 10 aa, Homo Sapiens
  sequence located in ANX1 OR LPC1 at 103-112 and may interact with Sequence 428 in this patent.
LEEVVLALLK

SEQ ID NO: 428 - protein, 10 aa, Homo Sapiens
  sequence located in HSTF2 OR HSF2 at 96-105 and may interact with Sequence 427 in this patent.
FKQGQDDLLE

SEQ ID NO: 429 - protein, 10 aa, Homo Sapiens
  sequence located in ANX1 OR LPC1 at 24-33 and may interact with Sequence 430 in this patent.
VKSSKGGPGS

SEQ ID NO: 430 - protein, 10 aa, Homo Sapiens
  sequence located in ID2 at 98-107 and may interact with Sequence 429 in this patent.
ASRTPLTTLN

SEQ ID NO: 431 - protein, 10 aa, Homo Sapiens
  sequence located in ANX1 OR LPC1 at 261-270 and may interact with Sequence 432 in this patent.
KCLTAIVKCA

SEQ ID NO: 432 - protein, 10 aa, Homo Sapiens
  sequence located in RPS6KA3 OR RSK2 OR ISPK1 at 41-50 and may interact with Sequence 431 in this patent.
LRQSRNYLGG

SEQ ID NO: 433 - protein, 10 aa, Homo Sapiens
  sequence located in ANX1 OR LPC1 at 260-269 and may interact with Sequence 434 in this patent.
EKCLTAIVKC

SEQ ID NO: 434 - protein, 10 aa, Homo Sapiens
  sequence located in RPS6KA3 OR RSK2 OR ISPK1 at 40-49 and may interact with Sequence 433 in this patent.
LLRQSRNYLG

SEQ ID NO: 435 - protein, 10 aa, Homo Sapiens
  sequence located in ANX1 OR LPC1 at 259-268 and may interact with Sequence 436 in this patent.
IEKCLTAIVK

SEQ ID NO: 436 - protein, 10 aa, Homo Sapiens
  sequence located in RPS6KA3 OR RSK2 OR ISPK1 at 39-48 and may interact with Sequence 435 in this patent.
YLLRQSRNYL

SEQ ID NO: 437 - protein, 10 aa, Homo Sapiens
  sequence located in ANX1 OR LPC1 at 103-112 and may interact with Sequence 438 in this patent.
LEEVVLALLK

SEQ ID NO: 438 - protein, 10 aa, Homo Sapiens
  sequence located in MTR at 474-483 and may interact with Sequence 437 in this patent.
LKEGEDDFLE

SEQ ID NO: 439 - protein, 10 aa, Homo Sapiens
  sequence located in ANX1 OR LPC1 at 104-113 and may interact with Sequence 440 in this patent.
EEVVLALLKT

SEQ ID NO: 440 - protein, 10 aa, Homo Sapiens
  sequence located in MTR at 473-482 and may interact with Sequence 439 in this patent.
SLKEGEDDFL

SEQ ID NO: 441 - protein, 10 aa, Homo Sapiens
  sequence located in ANX1 OR LPC1 at 262-271 and may interact with Sequence 442 in this patent.
CLTAIVKCAT

SEQ ID NO: 442 - protein, 10 aa, Homo Sapiens
  sequence located in MYB at 291-300 and may interact with Sequence 441 in this patent.
RKRRNDLRSR

SEQ ID NO: 443 - protein, 10 aa, Homo Sapiens
  sequence located in ANX1 OR LPC1 at 336-345 and may interact with Sequence 444 in this patent.
KILVALCGGN

SEQ ID NO: 444 - protein, 10 aa, Homo Sapiens
  sequence located in PECAM1 at 695-704 and may interact with Sequence 443 in this patent.
VSSAESHKDL

SEQ ID NO: 445 - protein, 10 aa, Homo Sapiens
  sequence located in ANX1 OR LPC1 at 206-215 and may interact with Sequence 446 in this patent.
YEAGERRKGT

SEQ ID NO: 446 - protein, 10 aa, Homo Sapiens
  sequence located in RAD51L1 OR RAD51B OR REC2 at 325-334 and may interact with Sequence 445 in this patent.
SPLAPFTSFV

SEQ ID NO: 447 - protein, 10 aa, Homo Sapiens
  sequence located in ANX1 OR LPC1 at 174-183 and may interact with Sequence 448 in this patent.
DFRNALLSLA

SEQ ID NO: 448 - protein, 10 aa, Homo Sapiens
  sequence located in RGS12 at 1165-1174 and may interact with Sequence 447 in this patent.
SKREESIAKI

SEQ ID NO: 449 - protein, 10 aa, Homo Sapiens
  sequence located in ANX1 OR LPC1 at 175-184 and may interact with Sequence 450 in this patent.
FRNALLSLAK

SEQ ID NO: 450 - protein, 10 aa, Homo Sapiens
  sequence located in RGS12 at 1164-1173 and may interact with Sequence 449 in this patent.
LSKREESIAK

SEQ ID NO: 451 - protein, 10 aa, Homo Sapiens
  sequence located in CLAPS2 OR AP17 at 176-185 and may interact with Sequence 452 in this patent.
FNPGALSSGG

SEQ ID NO: 452 - protein, 10 aa, Homo Sapiens
  sequence located in TAX1 OR TAG1 at 702-711 and may interact with Sequence 451 in this patent.
KIRTREAAPS

SEQ ID NO: 453 - protein, 10 aa, Homo Sapiens
  sequence located in CLAPS2 OR AP17 at 153-162 and may interact with Sequence 454 in this patent.
GSGSGGFSAS

SEQ ID NO: 454 - protein, 10 aa, Homo Sapiens
  sequence located in BCL2A1 OR BFL1 OR GRS OR BCL2L5 at 26-35 and may interact with Sequence 453 in this patent.
PGSGPSKTSR

SEQ ID NO: 455 - protein, 10 aa, Homo Sapiens
  sequence located in CLAPS2 OR AP17 at 151-160 and may interact with Sequence 456 in this patent.
AGGSGSGGFS

SEQ ID NO: 456 - protein, 10 aa, Homo Sapiens
  sequence located in COL7A1 at 1287-1296 and may interact with Sequence 455 in this patent.
GPPGSATAKG

SEQ ID NO: 457 - protein, 10 aa, Homo Sapiens
  sequence located in CLAPS2 OR AP17 at 152-161 and may interact with Sequence 458 in this patent.
GGSGSGGFSA

SEQ ID NO: 458 - protein, 10 aa, Homo Sapiens
  sequence located in COL11A2 at 22-31 and may interact with Sequence 457 in this patent.
AAAPAASKGC

SEQ ID NO: 459 - protein, 10 aa, Homo Sapiens
  sequence located in CLAPS2 OR AP17 at 151-160 and may interact with Sequence 460 in this patent.
AGGSGSGGFS

SEQ ID NO: 460 - protein, 10 aa, Homo Sapiens
  sequence located in CNTFR at 316-325 and may interact with Sequence 459 in this patent.
AETTTSTTSS

SEQ ID NO: 461 - protein, 10 aa, Homo Sapiens
  sequence located in CLAPS2 OR AP17 at 16-25 and may interact with Sequence 462 in this patent.
ASFLPSESGP

SEQ ID NO: 462 - protein, 10 aa, Homo Sapiens
  sequence located in C6 at 452-461 and may interact with Sequence 461 in this patent.
GAALAWEKGS

SEQ ID NO: 463 - protein, 10 aa, Homo Sapiens
  sequence located in CLAPS2 OR AP17 at 76-85 and may interact with Sequence 464 in this patent.
LERLIIQSSN

SEQ ID NO: 464 - protein, 10 aa, Homo Sapiens
  sequence located in MMP15 at 290-299 and may interact with Sequence 463 in this patent.
KLPEDDLRGI

SEQ ID NO: 465 - protein, 10 aa, Homo Sapiens
  sequence located in CLAPS2 OR AP17 at 75-84 and may interact with Sequence 466 in this patent.
ELERLIIQSS

SEQ ID NO: 466 - protein, 10 aa, Homo Sapiens
  sequence located in MMP15 at 289-298 and may interact with Sequence 465 in this patent.
FKLPEDDLRG

SEQ ID NO: 467 - protein, 10 aa, Homo Sapiens
  sequence located in CLAPS2 OR AP17 at 264-273 and may interact with Sequence 468 in this patent.
IAASKCRKRK

SEQ ID NO: 468 - protein, 10 aa, Homo Sapiens
  sequence located in CYP1A1 at 72-81 and may interact with Sequence 467 in this patent.
LSFARLARRY

SEQ ID NO: 469 - protein, 10 aa, Homo Sapiens
  sequence located in CLAPS2 OR AP17 at 183-192 and may interact with Sequence 470 in this patent.
SGGGAPSYGA

SEQ ID NO: 470 - protein, 10 aa, Homo Sapiens
  sequence located in ETFDH at 29-38 and may interact with Sequence 469 in this patent.
CAIRWSSTST

SEQ ID NO: 471 - protein, 10 aa, Homo Sapiens
  sequence located in CLAPS2 OR AP17 at 150-159 and may interact with Sequence 472 in this patent.
VAGGSGSGGF

SEQ ID NO: 472 - protein, 10 aa, Homo Sapiens
  sequence located in USP9Y OR USP10 OR DFFRY at 875-884 and may interact with Sequence 471 in this patent.
KPPRPGAPGH

SEQ ID NO: 473 - protein, 10 aa, Homo Sapiens
  sequence located in CLAPS2 OR AP17 at 152-161 and may interact with Sequence 474 in this patent.
GGSGSGGFSA

SEQ ID NO: 474 - protein, 10 aa, Homo Sapiens
  sequence located in FRAP at 1838-1847 and may interact with Sequence 473 in this patent.
ATTTASTEGS

SEQ ID NO: 475 - protein, 10 aa, Homo Sapiens
  sequence located in CLAPS2 OR AP17 at 152-161 and may interact with Sequence 476 in this patent.
GGSGSGGFSA

SEQ ID NO: 476 - protein, 10 aa, Homo Sapiens
  sequence located in PI7 OR PN1 at 351-360 and may interact with Sequence 475 in this patent.
GTKASAATTA

SEQ ID NO: 477 - protein, 10 aa, Homo Sapiens
  sequence located in CLAPS2 OR AP17 at 183-192 and may interact with Sequence 478 in this patent.
SGGGAPSYGA

SEQ ID NO: 478 - protein, 10 aa, Homo Sapiens
  sequence located in GPR2 at 101-110 and may interact with Sequence 477 in this patent.
GSATCRTISG

SEQ ID NO: 479 - protein, 10 aa, Homo Sapiens
  sequence located in CLAPS2 OR AP17 at 178-187 and may interact with Sequence 480 in this patent.
PGALSSGGGA

SEQ ID NO: 480 - protein, 10 aa, Homo Sapiens
  sequence located in HSPCB OR HSPC2 OR HSP90B at 52-61 and may interact with Sequence 479 in this patent.
RAAPAGEGSR

SEQ ID NO: 481 - protein, 10 aa, Homo Sapiens
  sequence located in CLAPS2 OR AP17 at 178-187 and may interact with Sequence 482 in this patent.
PGALSSGGGA

SEQ ID NO: 482 - protein, 10 aa, Homo Sapiens
  sequence located in INHA at 222-231 and may interact with Sequence 481 in this patent.
RPPSGGERAR

SEQ ID NO: 483 - protein, 10 aa, Homo Sapiens
  sequence located in CLAPS2 OR AP17 at 145-154 and may interact with Sequence 484 in this patent.
PAVASVAGGS

SEQ ID NO: 484 - protein, 10 aa, Homo Sapiens
  sequence located in DAGK4 at 273-282 and may interact with Sequence 483 in this patent.
GGDGADGSAA

SEQ ID NO: 485 - protein, 10 aa, Homo Sapiens
  sequence located in CLAPS2 OR AP17 at 178-187 and may interact with Sequence 486 in this patent.
PGALSSGGGA

SEQ ID NO: 486 - protein, 10 aa, Homo Sapiens
  sequence located in MKI67 at 597-606 and may interact with Sequence 485 in this patent.
RSCKTAPASS

SEQ ID NO: 487 - protein, 10 aa, Homo Sapiens
  sequence located in CLAPS2 OR AP17 at 144-153 and may interact with Sequence 488 in this patent.
APAVASVAGG

SEQ ID NO: 488 - protein, 10 aa, Homo Sapiens
  sequence located in MUC5AC OR MUC5 at 942-951 and may interact with Sequence 487 in this patent.
CRGNCGDSSS

SEQ ID NO: 489 - protein, 10 aa, Homo Sapiens
  sequence located in CLAPS2 OR AP17 at 143-152 and may interact with Sequence 490 in this patent.
VAPAVASVAG

SEQ ID NO: 490 - protein, 10 aa, Homo Sapiens
  sequence located in MUC5AC OR MUC5 at 941-950 and may interact with Sequence 489 in this patent.
YCRGNCGDSS

SEQ ID NO: 491 - protein, 10 aa, Homo Sapiens
  sequence located in CLAPS2 OR AP17 at 180-189 and may interact with Sequence 492 in this patent.
ALSSGGGAPS

SEQ ID NO: 492 - protein, 10 aa, Homo Sapiens
  sequence located in NTF4 OR NTF5 at 83-92 and may interact with Sequence 491 in this patent.
SETAPASRRG

SEQ ID NO: 493 - protein, 10 aa, Homo Sapiens
  sequence located in CLAPS2 OR AP17 at 151-160 and may interact with Sequence 494 in this patent.
AGGSGSGGFS

SEQ ID NO: 494 - protein, 10 aa, Homo Sapiens
  sequence located in PTN OR NEGF1 OR HBNF1 at 125-134 and may interact with Sequence 493 in this patent.
SSTAATTPET

SEQ ID NO: 495 - protein, 10 aa, Homo Sapiens
  sequence located in CLAPS2 OR AP17 at 150-159 and may interact with Sequence 496 in this patent.
VAGGSGSGGF

SEQ ID NO: 496 - protein, 10 aa, Homo Sapiens
  sequence located in PTN OR NEGF1 OR HBNF1 at 124-133 and may interact with Sequence 495 in this patent.
NSSTAATTPE

SEQ ID NO: 497 - protein, 10 aa, Homo Sapiens
  sequence located in CLAPS2 OR AP17 at 149-158 and may interact with Sequence 498 in this patent.
SVAGGSGSGG

SEQ ID NO: 498 - protein, 10 aa, Homo Sapiens
  sequence located in PTN OR NEGF1 OR HBNF1 at 123-132 and may interact with Sequence 497 in this patent.
GNSSTAATTP

SEQ ID NO: 499 - protein, 10 aa, Homo Sapiens
  sequence located in CLAPS2 OR AP17 at 148-157 and may interact with Sequence 500 in this patent.
ASVAGGSGSG

SEQ ID NO: 500 - protein, 10 aa, Homo Sapiens
  sequence located in PTHR1 OR PTHR at 271-280 and may interact with Sequence 499 in this patent.
PATAAAGYAG

SEQ ID NO: 501 - protein, 10 aa, Homo Sapiens
  sequence located in CLAPS2 OR AP17 at 149-158 and may interact with Sequence 502 in this patent.
SVAGGSGSGG

SEQ ID NO: 502 - protein, 10 aa, Homo Sapiens
  sequence located in PTHR1 OR PTHR at 270-279 and may interact with Sequence 501 in this patent.
PPATAAAGYA

SEQ ID NO: 503 - protein, 10 aa, Homo Sapiens
  sequence located in CLAPS2 OR AP17 at 152-161 and may interact with Sequence 504 in this patent.
GGSGSGGFSA

SEQ ID NO: 504 - protein, 10 aa, Homo Sapiens
  sequence located in RBL1 at 650-659 and may interact with Sequence 503 in this patent.
SPTAGSAKRR

SEQ ID NO: 505 - protein, 10 aa, Homo Sapiens
  sequence located in CLAPS2 OR AP17 at 151-160 and may interact with Sequence 506 in this patent.
AGGSGSGGFS

SEQ ID NO: 506 - protein, 10 aa, Homo Sapiens
  sequence located in RBL1 at 649-658 and may interact with Sequence 505 in this patent.
SSPTAGSAKR

SEQ ID NO: 507 - protein, 10 aa, Homo Sapiens
  sequence located in CLAPS2 OR AP17 at 150-159 and may interact with Sequence 508 in this patent.
VAGGSGSGGF

SEQ ID NO: 508 - protein, 10 aa, Homo Sapiens
  sequence located in RBL1 at 648-657 and may interact with Sequence 507 in this patent.
YSSPTAGSAK

SEQ ID NO: 509 - protein, 10 aa, Homo Sapiens
  sequence located in CLAPS2 OR AP17 at 149-158 and may interact with Sequence 510 in this patent.
SVAGGSGSGG

SEQ ID NO: 510 - protein, 10 aa, Homo Sapiens
  sequence located in RBL1 at 647-656 and may interact with Sequence 509 in this patent.
RYSSPTAGSA

SEQ ID NO: 511 - protein, 10 aa, Homo Sapiens
  sequence located in CLAPS2 OR AP17 at 152-161 and may interact with Sequence 512 in this patent.
GGSGSGGFSA

SEQ ID NO: 512 - protein, 10 aa, Homo Sapiens
  sequence located in RGC1 OR C1 at 202-211 and may interact with Sequence 511 in this patent.
TTTAGATEAG

SEQ ID NO: 513 - protein, 10 aa, Homo Sapiens
  sequence located in CLAPS2 OR AP17 at 191-200 and may interact with Sequence 514 in this patent.
GAAGLAFPAQ

SEQ ID NO: 514 - protein, 10 aa, Homo Sapiens
  sequence located in RGS12 at 870-879 and may interact with Sequence 513 in this patent.
LSGKSKSGRS

SEQ ID NO: 515 - protein, 10 aa, Homo Sapiens
  sequence located in CLAPS2 OR AP17 at 154-163 and may interact with Sequence 516 in this patent.
SGSGGFSASL

SEQ ID NO: 516 - protein, 10 aa, Homo Sapiens
  sequence located in RYK at 4258-4267 and may interact with Sequence 515 in this patent.
GAGAAEAGAE

SEQ ID NO: 517 - protein, 10 aa, Homo Sapiens
  sequence located in CLAPS2 OR AP17 at 149-158 and may interact with Sequence 518 in this patent.
SVAGGSGSGG

SEQ ID NO: 518 - protein, 10 aa, Homo Sapiens
  sequence located in SMARCA2 OR SNF2L2 OR BRM OR SNF2A at 1260-1269 and may interact with Sequence 517 in this patent.
RHCSTGSGSA

SEQ ID NO: 519 - protein, 10 aa, Homo Sapiens
  sequence located in CLAPS2 OR AP17 at 148-157 and may interact with Sequence 520 in this patent.
ASVAGGSGSG

SEQ ID NO: 520 - protein, 10 aa, Homo Sapiens
  sequence located in SMARCA2 OR SNF2L2 OR BRM OR SNF2A at 1259-1268 and may interact with Sequence 519 in this patent.
SRHCSTGSGS

SEQ ID NO: 521 - protein, 10 aa, Homo Sapiens
  sequence located in CLAPS2 OR AP17 at 279-288 and may interact with Sequence 522 in this patent.
RLEEKVKTLK

SEQ ID NO: 522 - protein, 10 aa, Homo Sapiens
  sequence located in STAT2 at 266-275 and may interact with Sequence 521 in this patent.
AKLLFHLRQL

SEQ ID NO: 523 - protein, 10 aa, Homo Sapiens
  sequence located in CLAPS2 OR AP17 at 278-287 and may interact with Sequence 524 in this patent.
ARLEEKVKTL

SEQ ID NO: 524 - protein, 10 aa, Homo Sapiens
  sequence located in STAT2 at 265-274 and may interact with Sequence 523 in this patent.
GAKLLFHLRQ

SEQ ID NO: 525 - protein, 10 aa, Homo Sapiens
  sequence located in CLAPS2 OR AP17 at 248-257 and may interact with Sequence 526 in this patent.
ESQERIKAER

SEQ ID NO: 526 - protein, 10 aa, Homo Sapiens
  sequence located in TIE1 OR TIE at 25-34 and may interact with Sequence 525 in this patent.
LTLLANLRLT

SEQ ID NO: 527 - protein, 10 aa, Homo Sapiens
  sequence located in CLAPS2 OR AP17 at 149-158 and may interact with Sequence 528 in this patent.
SVAGGSGSGG

SEQ ID NO: 528 - protein, 10 aa, Homo Sapiens
  sequence located in UBE1L OR UBE2 at 580-589 and may interact with Sequence 527 in this patent.
AYRAPASAAA

SEQ ID NO: 529 - protein, 10 aa, Homo Sapiens
  sequence located in CLAPS2 OR AP17 at 191-200 and may interact with Sequence 530 in this patent.
GAAGLAFPAQ

SEQ ID NO: 530 - protein, 10 aa, Homo Sapiens
  sequence located in WRB OR CHD5 at 1398-1407 and may interact with Sequence 529 in this patent.
TSSAERKRRL

SEQ ID NO: 531 - protein, 10 aa, Homo Sapiens
  sequence located in CLAPM1 OR AP2M1 at 119-128 and may interact with Sequence 532 in this patent.
GYPQNSETGA

SEQ ID NO: 532 - protein, 10 aa, Homo Sapiens
  sequence located in HK3 at 100-109 and may interact with Sequence 531 in this patent.
GASLRVLWVT

SEQ ID NO: 533 - protein, 10 aa, Homo Sapiens
  sequence located in CLAPM1 OR AP2M1 at 231-240 and may interact with Sequence 534 in this patent.
DETSKSGKQS

SEQ ID NO: 534 - protein, 10 aa, Homo Sapiens
  sequence located in MIP OR AQP0 at 12-21 and may interact with Sequence 533 in this patent.
VLSALGALLG

SEQ ID NO: 535 - protein, 10 aa, Homo Sapiens
  sequence located in CLAPM1 OR AP2M1 at 339-348 and may interact with Sequence 536 in this patent.
KGKAKYKASE

SEQ ID NO: 536 - protein, 10 aa, Homo Sapiens
  sequence located in PAI1 OR PLANH1 at 7-16 and may interact with Sequence 535 in this patent.
LTCLVLGLAL

SEQ ID NO: 537 - protein, 10 aa, Homo Sapiens
  sequence located in CLAPM1 OR AP2M1 at 283-292 and may interact with Sequence 538 in this patent.
IILPFRVIPL

SEQ ID NO: 538 - protein, 10 aa, Homo Sapiens
  sequence located in PTPN11 OR PTP2C at 155-164 and may interact with Sequence 537 in this patent.
DDKGESNDGK

SEQ ID NO: 539 - protein, 10 aa, Homo Sapiens
  sequence located in CLAPM1 OR AP2M1 at 423-432 and may interact with Sequence 540 in this patent.
RYIGRSGIYE

SEQ ID NO: 540 - protein, 10 aa, Homo Sapiens
  sequence located in REL at 290-299 and may interact with Sequence 539 in this patent.
LVDTGASYIS

SEQ ID NO: 541 - protein, 10 aa, Homo Sapiens
  sequence located in CLAPM1 OR AP2M1 at 93-102 and may interact with Sequence 542 in this patent.
FGKISEENIK

SEQ ID NO: 542 - protein, 10 aa, Homo Sapiens
  sequence located in TIAM1 at 1081-1090 and may interact with Sequence 541 in this patent.
LDVLFGNLTE

SEQ ID NO: 543 - protein, 10 aa, Homo Sapiens
  sequence located in CLAPM1 OR AP2M1 at 258-267 and may interact with Sequence 544 in this patent.
DSERSISFIP

SEQ ID NO: 544 - protein, 10 aa, Homo Sapiens
  sequence located in ZNF138 at 14-23 and may interact with Sequence 543 in this patent.
VTLSRYGKYG

SEQ ID NO: 545 - protein, 10 aa, Homo Sapiens
  sequence located in CLAPM1 OR AP2M1 at 257-266 and may interact with Sequence 546 in this patent.
FDSERSISFI

SEQ ID NO: 546 - protein, 10 aa, Homo Sapiens
  sequence located in ZNF138 at 13-22 and may interact with Sequence 545 in this patent.
KVTLSRYGKY

SEQ ID NO: 547 - protein, 10 aa, Homo Sapiens
  sequence located in APOB at 1998-2007 and may interact with Sequence 548 in this patent.
AYNTKDKIGV

SEQ ID NO: 548 - protein, 10 aa, Homo Sapiens
  sequence located in APOB at 484-493 and may interact with Sequence 547 in this patent.
YTYLILRVIG

SEQ ID NO: 549 - protein, 10 aa, Homo Sapiens
  sequence located in APOB at 4099-4108 and may interact with Sequence 550 in this patent.
EVSSKLRRNL

SEQ ID NO: 550 - protein, 10 aa, Homo Sapiens
  sequence located in APOB at 4099-4108 and may interact with Sequence 549 in this patent.
EVSSKLRRNL

SEQ ID NO: 551 - protein, 10 aa, Homo Sapiens
  sequence located in APOB at 3523-3532 and may interact with Sequence 552 in this patent.
SKSTRSSVKL

SEQ ID NO: 552 - protein, 10 aa, Homo Sapiens
  sequence located in Unknown at 270-279 and may interact with Sequence 551 in this patent.
ALRRARANLQ

SEQ ID NO: 553 - protein, 10 aa, Homo Sapiens
  sequence located in APOB at 1685-1694 and may interact with Sequence 554 in this patent.
TTNGRFREHN

SEQ ID NO: 554 - protein, 10 aa, Homo Sapiens
  sequence located in ADRBK2 OR GRK3 OR BARK2 at 32-41 and may interact with Sequence 553 in this patent.
IVLPEPSIRS

SEQ ID NO: 555 - protein, 10 aa, Homo Sapiens
  sequence located in APOB at 1686-1695 and may interact with Sequence 556 in this patent.
TNGRFREHNA

SEQ ID NO: 556 - protein, 10 aa, Homo Sapiens
  sequence located in ADRBK2 OR GRK3 OR BARK2 at 31-40 and may interact with Sequence 555 in this patent.
RIVLPEPSIR

SEQ ID NO: 557 - protein, 10 aa, Homo Sapiens
  sequence located in APOB at 1848-1857 and may interact with Sequence 558 in this patent.
SASYKADTVA

SEQ ID NO: 558 - protein, 10 aa, Homo Sapiens
  sequence located in ATP5A1 at 71-80 and may interact with Sequence 557 in this patent.
TGRVLSIGDG

SEQ ID NO: 559 - protein, 10 aa, Homo Sapiens
  sequence located in APOB at 1847-1856 and may interact with Sequence 560 in this patent.
LSASYKADTV

SEQ ID NO: 560 - protein, 10 aa, Homo Sapiens
  sequence located in ATP5A1 at 70-79 and may interact with Sequence 559 in this patent.
ETGRVLSIGD

SEQ ID NO: 561 - protein, 10 aa, Homo Sapiens
  sequence located in APOB at 4129-4138 and may interact with Sequence 562 in this patent.
RFQKAASGTT

SEQ ID NO: 562 - protein, 10 aa, Homo Sapiens
  sequence located in BLR1 at 525-534 and may interact with Sequence 561 in this patent.
SELLSCGPRG

SEQ ID NO: 563 - protein, 10 aa, Homo Sapiens
  sequence located in APOB at 3703-3712 and may interact with Sequence 564 in this patent.
RVSTAFVYTK

SEQ ID NO: 564 - protein, 10 aa, Homo Sapiens
  sequence located in C4BPA OR C4BP at 107-116 and may interact with Sequence 563 in this patent.
FCIYKRCRHP

SEQ ID NO: 565 - protein, 10 aa, Homo Sapiens
  sequence located in APOB at 5-14 and may interact with Sequence 566 in this patent.
RPALLALLAL

SEQ ID NO: 566 - protein, 10 aa, Homo Sapiens
  sequence located in COL5A1 at 448-457 and may interact with Sequence 565 in this patent.
PRGEKGQKGE

SEQ ID NO: 567 - protein, 10 aa, Homo Sapiens
  sequence located in APOB at 4-13 and may interact with Sequence 568 in this patent.
PRPALLALLA

SEQ ID NO: 568 - protein, 10 aa, Homo Sapiens
  sequence located in COL5A1 at 447-456 and may interact with Sequence 567 in this patent.
GPRGEKGQKG

SEQ ID NO: 569 - protein, 10 aa, Homo Sapiens
  sequence located in APOB at 3-12 and may interact with Sequence 570 in this patent.
PPRPALLALL

SEQ ID NO: 570 - protein, 10 aa, Homo Sapiens
  sequence located in COL5A1 at 446-455 and may interact with Sequence 569 in this patent.
GGPRGEKGQK

SEQ ID NO: 571 - protein, 10 aa, Homo Sapiens
  sequence located in APOB at 2-11 and may interact with Sequence 572 in this patent.
DPPRPALLAL

SEQ ID NO: 572 - protein, 10 aa, Homo Sapiens
  sequence located in COL5A1 at 445-454 and may interact with Sequence 571 in this patent.
IGGPRGEKGQ

SEQ ID NO: 573 - protein, 10 aa, Homo Sapiens
  sequence located in APOB at 911-920 and may interact with Sequence 574 in this patent.
LEAHVALKAG

SEQ ID NO: 574 - protein, 10 aa, Homo Sapiens
  sequence located in COL11A1 at 786-795 and may interact with Sequence 573 in this patent.
PGFKGDMGLK

SEQ ID NO: 575 - protein, 10 aa, Homo Sapiens
  sequence located in APOB at 912-921 and may interact with Sequence 576 in this patent.
EAHVALKAGK

SEQ ID NO: 576 - protein, 10 aa, Homo Sapiens
  sequence located in COL11A1 at 785-794 and may interact with Sequence 575 in this patent.
FPGFKGDMGL

SEQ ID NO: 577 - protein, 10 aa, Homo Sapiens
  sequence located in APOB at 232-241 and may interact with Sequence 578 in this patent.
TRPLSTLISS

SEQ ID NO: 578 - protein, 10 aa, Homo Sapiens
  sequence located in COL5A3 at 2190-2199 and may interact with Sequence 577 in this patent.
GPGETGKNGG

SEQ ID NO: 579 - protein, 10 aa, Homo Sapiens
  sequence located in APOB at 1539-1548 and may interact with Sequence 580 in this patent.
DGTLSLTSTS

SEQ ID NO: 580 - protein, 10 aa, Homo Sapiens
  sequence located in CA6 at 41-50 and may interact with Sequence 579 in this patent.
ACGGQRQSPI

SEQ ID NO: 581 - protein, 10 aa, Homo Sapiens
  sequence located in APOB at 2849-2858 and may interact with Sequence 582 in this patent.
AIEGKSNTVA

SEQ ID NO: 582 - protein, 10 aa, Homo Sapiens
  sequence located in CAPZB at 191-200 and may interact with Sequence 581 in this patent.
RDLALAIRDS

SEQ ID NO: 583 - protein, 10 aa, Homo Sapiens
  sequence located in APOB at 4130-4139 and may interact with Sequence 584 in this patent.
FQKAASGTTG

SEQ ID NO: 584 - protein, 10 aa, Homo Sapiens
  sequence located in CREBBP OR CBP at 72-81 and may interact with Sequence 583 in this patent.
ELLRGGSGSS

SEQ ID NO: 585 - protein, 10 aa, Homo Sapiens
  sequence located in APOB at 4129-4138 and may interact with Sequence 586 in this patent.
RFQKAASGTT

SEQ ID NO: 586 - protein, 10 aa, Homo Sapiens
  sequence located in CREBBP OR CBP at 71-80 and may interact with Sequence 585 in this patent.
SELLRGGSGS

SEQ ID NO: 587 - protein, 10 aa, Homo Sapiens
  sequence located in APOB at 3078-3087 and may interact with Sequence 588 in this patent.
LSPSAQQASW

SEQ ID NO: 588 - protein, 10 aa, Homo Sapiens
  sequence located in CDC27 at 263-272 and may interact with Sequence 587 in this patent.
KTGRSLLGGP

SEQ ID NO: 589 - protein, 10 aa, Homo Sapiens
  sequence located in APOB at 1539-1548 and may interact with Sequence 590 in this patent.
DGTLSLTSTS

SEQ ID NO: 590 - protein, 10 aa, Homo Sapiens
  sequence located in CCNC at 246-255 and may interact with Sequence 589 in this patent.
GSGGQAERTI

SEQ ID NO: 591 - protein, 10 aa, Homo Sapiens
  sequence located in APOB at 2779-2788 and may interact with Sequence 592 in this patent.
NGTTSANEAG

SEQ ID NO: 592 - protein, 10 aa, Homo Sapiens
  sequence located in CCNC at 262-271 and may interact with Sequence 591 in this patent.
VSRGARILSA

SEQ ID NO: 593 - protein, 10 aa, Homo Sapiens
  sequence located in APOB at 2778-2787 and may interact with Sequence 594 in this patent.
GNGTTSANEA

SEQ ID NO: 594 - protein, 10 aa, Homo Sapiens
  sequence located in CCNC at 261-270 and may interact with Sequence 593 in this patent.
AVSRGARILS

SEQ ID NO: 595 - protein, 10 aa, Homo Sapiens
  sequence located in APOB at 3383-3392 and may interact with Sequence 596 in this patent.
GTTRLTRKRG

SEQ ID NO: 596 - protein, 10 aa, Homo Sapiens
  sequence located in KCNB1 at 606-615 and may interact with Sequence 595 in this patent.
TSLPSKTGGS

SEQ ID NO: 597 - protein, 10 aa, Homo Sapiens
  sequence located in APOB at 1127-1136 and may interact with Sequence 598 in this patent.
PRLQAEARSE

SEQ ID NO: 598 - protein, 10 aa, Homo Sapiens
  sequence located in KCNQ3 at 491-500 and may interact with Sequence 597 in this patent.
FRASLRLKPR

SEQ ID NO: 599 - protein, 10 aa, Homo Sapiens
  sequence located in APOB at 2005-2014 and may interact with Sequence 600 in this patent.
IGVELTGRTL

SEQ ID NO: 600 - protein, 10 aa, Homo Sapiens
  sequence located in CMKBR7 OR EBI1 OR EVI1 at 196-205 and may interact with Sequence 599 in this patent.
YSDLQRSSSE

SEQ ID NO: 601 - protein, 10 aa, Homo Sapiens
  sequence located in APOB at 2004-2013 and may interact with Sequence 602 in this patent.
KIGVELTGRT

SEQ ID NO: 602 - protein, 10 aa, Homo Sapiens
  sequence located in CMKBR7 OR EBI1 OR EVI1 at 195-204 and may interact with Sequence 601 in this patent.
LYSDLQRSSS

SEQ ID NO: 603 - protein, 10 aa, Homo Sapiens
  sequence located in APOB at 3697-3706 and may interact with Sequence 604 in this patent.
GRRQHLRVST

SEQ ID NO: 604 - protein, 10 aa, Homo Sapiens
  sequence located in CHAT at 234-243 and may interact with Sequence 603 in this patent.
SRNTEMLAAA

SEQ ID NO: 605 - protein, 10 aa, Homo Sapiens
  sequence located in APOB at 1540-1549 and may interact with Sequence 606 in this patent.
GTLSLTSTSD

SEQ ID NO: 606 - protein, 10 aa, Homo Sapiens
  sequence located in C2 at 674-683 and may interact with Sequence 605 in this patent.
PCKGESGGAV

SEQ ID NO: 607 - protein, 10 aa, Homo Sapiens
  sequence located in APOB at 2963-2972 and may interact with Sequence 608 in this patent.
INSKHLRVNQ

SEQ ID NO: 608 - protein, 10 aa, Homo Sapiens
  sequence located in CYP2C9 at 236-245 and may interact with Sequence 607 in this patent.
NVAFMKSYIL

SEQ ID NO: 609 - protein, 10 aa, Homo Sapiens
  sequence located in APOB at 1850-1859 and may interact with Sequence 610 in this patent.
SYKADTVAKV

SEQ ID NO: 610 - protein, 10 aa, Homo Sapiens
  sequence located in CRHR1 OR CRHR OR CRFR at 124-133 and may interact with Sequence 609 in this patent.
YLGHCISLVA

SEQ ID NO: 611 - protein, 10 aa, Homo Sapiens
  sequence located in APOB at 1235-1244 and may interact with Sequence 612 in this patent.
SSWLQKASGS

SEQ ID NO: 612 - protein, 10 aa, Homo Sapiens
  sequence located in GUCY2F OR GUC2F OR RETGC2 at 713-722 and may interact with Sequence 611 in this patent.
TAPELLRAPR

SEQ ID NO: 613 - protein, 10 aa, Homo Sapiens
  sequence located in APOB at 3506-3515 and may interact with Sequence 614 in this patent.
SREYSGTIAS

SEQ ID NO: 614 - protein, 10 aa, Homo Sapiens
  sequence located in DCI at 97-106 and may interact with Sequence 613 in this patent.
TSDRPGVFSA

SEQ ID NO: 615 - protein, 10 aa, Homo Sapiens
  sequence located in APOB at 3507-3516 and may interact with Sequence 616 in this patent.
REYSGTIASE

SEQ ID NO: 616 - protein, 10 aa, Homo Sapiens
  sequence located in DCI at 96-105 and may interact with Sequence 615 in this patent.
LTSDRPGVFS

SEQ ID NO: 617 - protein, 10 aa, Homo Sapiens
  sequence located in APOB at 972-981 and may interact with Sequence 618 in this patent.
GLNYCTSGAY

SEQ ID NO: 618 - protein, 10 aa, Homo Sapiens
  sequence located in DAG1 at 370-379 and may interact with Sequence 617 in this patent.
IRTRGAIIQT

SEQ ID NO: 619 - protein, 10 aa, Homo Sapiens
  sequence located in APOB at 973-982 and may interact with Sequence 620 in this patent.
LNYCTSGAYS

SEQ ID NO: 620 - protein, 10 aa, Homo Sapiens
  sequence located in DAG1 at 369-378 and may interact with Sequence 619 in this patent.
TIRTRGAIIQ

SEQ ID NO: 621 - protein, 10 aa, Homo Sapiens
  sequence located in APOB at 974-983 and may interact with Sequence 622 in this patent.
NYCTSGAYSN

SEQ ID NO: 622 - protein, 10 aa, Homo Sapiens
  sequence located in DAG1 at 368-377 and may interact with Sequence 621 in this patent.
VTIRTRGAII

SEQ ID NO: 623 - protein, 10 aa, Homo Sapiens
  sequence located in APOB at 1653-1662 and may interact with Sequence 624 in this patent.
STSATTNLKC

SEQ ID NO: 624 - protein, 10 aa, Homo Sapiens
  sequence located in DEFA4 OR DEF4 at 53-62 and may interact with Sequence 623 in this patent.
ALQVSGSTRG

SEQ ID NO: 625 - protein, 10 aa, Homo Sapiens
  sequence located in APOB at 353-362 and may interact with Sequence 626 in this patent.
TELRGLSDEA

SEQ ID NO: 626 - protein, 10 aa, Homo Sapiens
  sequence located in POLE1 OR POLE at 1265-1274 and may interact with Sequence 625 in this patent.
RLESAEGVLR

SEQ ID NO: 627 - protein, 10 aa, Homo Sapiens
  sequence located in APOB at 676-685 and may interact with Sequence 628 in this patent.
TLTAFGFASA

SEQ ID NO: 628 - protein, 10 aa, Homo Sapiens
  sequence located in POLZ OR REV3 OR REV3L at 3022-3031 and may interact with Sequence 627 in this patent.
SRSEPEGRKG

SEQ ID NO: 629 - protein, 10 aa, Homo Sapiens
  sequence located in APOB at 4096-4105 and may interact with Sequence 630 in this patent.
TLREVSSKLR

SEQ ID NO: 630 - protein, 10 aa, Homo Sapiens
  sequence located in POLZ OR REV3 OR REV3L at 952-961 and may interact with Sequence 629 in this patent.
GESLDGTLKS

SEQ ID NO: 631 - protein, 10 aa, Homo Sapiens
  sequence located in APOB at 3677-3686 and may interact with Sequence 632 in this patent.
LPVYDKSLWD

SEQ ID NO: 632 - protein, 10 aa, Homo Sapiens
  sequence located in DPYSL3 OR ULIP OR DRP3 at 270-279 and may interact with Sequence 631 in this patent.
KGNVVFGEPI

SEQ ID NO: 633 - protein, 10 aa, Homo Sapiens
  sequence located in APOB at 1300-1309 and may interact with Sequence 634 in this patent.
LPFGGKSSRD

SEQ ID NO: 634 - protein, 10 aa, Homo Sapiens
  sequence located in DNM1 OR DNM at 248-257 and may interact with Sequence 633 in this patent.
ITAALAAERK

SEQ ID NO: 635 - protein, 10 aa, Homo Sapiens
  sequence located in APOB at 3383-3392 and may interact with Sequence 636 in this patent.
GTTRLTRKRG

SEQ ID NO: 636 - protein, 10 aa, Homo Sapiens
  sequence located in EFNB3 OR EPLG8 OR LERK8 at 213-222 and may interact with Sequence 635 in this patent.
SRGAEGPLPP

SEQ ID NO: 637 - protein, 10 aa, Homo Sapiens
  sequence located in APOB at 4411-4420 and may interact with Sequence 638 in this patent.
IKNLLVALKD

SEQ ID NO: 638 - protein, 10 aa, Homo Sapiens
  sequence located in Unknown at 266-275 and may interact with Sequence 637 in this patent.
NLVKKYSQFI

SEQ ID NO: 639 - protein, 10 aa, Homo Sapiens
  sequence located in APOB at 4410-4419 and may interact with Sequence 640 in this patent.
LIKNLLVALK

SEQ ID NO: 640 - protein, 10 aa, Homo Sapiens
  sequence located in Unknown at 265-274 and may interact with Sequence 639 in this patent.
KNLVKKYSQF

SEQ ID NO: 641 - protein, 10 aa, Homo Sapiens
  sequence located in APOB at 644-653 and may interact with Sequence 642 in this patent.
SLPSLDPASA

SEQ ID NO: 642 - protein, 10 aa, Homo Sapiens
  sequence located in LMAN1 OR ERGIC53 at 170-179 and may interact with Sequence 641 in this patent.
RASGVEARQA

SEQ ID NO: 643 - protein, 10 aa, Homo Sapiens
  sequence located in APOB at 567-576 and may interact with Sequence 644 in this patent.
RSPSQADINK

SEQ ID NO: 644 - protein, 10 aa, Homo Sapiens
  sequence located in ERF at 118-127 and may interact with Sequence 643 in this patent.
FIDVGLAGGA

SEQ ID NO: 645 - protein, 10 aa, Homo Sapiens
  sequence located in APOB at 552-561 and may interact with Sequence 646 in this patent.
ASPGDKRLAA

SEQ ID NO: 646 - protein, 10 aa, Homo Sapiens
  sequence located in ETS2 at 377-386 and may interact with Sequence 645 in this patent.
SCQSFISWTG

SEQ ID NO: 647 - protein, 10 aa, Homo Sapiens
  sequence located in APOB at 2776-2785 and may interact with Sequence 648 in this patent.
DIGNGTTSAN

SEQ ID NO: 648 - protein, 10 aa, Homo Sapiens
  sequence located in EYA3 at 175-184 and may interact with Sequence 647 in this patent.
ISTSSTIANI

SEQ ID NO: 649 - protein, 10 aa, Homo Sapiens
  sequence located in APOB at 2777-2786 and may interact with Sequence 650 in this patent.
IGNGTTSANE

SEQ ID NO: 650 - protein, 10 aa, Homo Sapiens
  sequence located in EYA3 at 174-183 and may interact with Sequence 649 in this patent.
LISTSSTIAN

SEQ ID NO: 651 - protein, 10 aa, Homo Sapiens
  sequence located in APOB at 2778-2787 and may interact with Sequence 652 in this patent.
GNGTTSANEA

SEQ ID NO: 652 - protein, 10 aa, Homo Sapiens
  sequence located in EYA3 at 173-182 and may interact with Sequence 651 in this patent.
SLISTSSTIA

SEQ ID NO: 653 - protein, 10 aa, Homo Sapiens
  sequence located in APOB at 2779-2788 and may interact with Sequence 654 in this patent.
NGTTSANEAG

SEQ ID NO: 654 - protein, 10 aa, Homo Sapiens
  sequence located in EYA3 at 172-181 and may interact with Sequence 653 in this patent.
ASLISTSSTI

SEQ ID NO: 655 - protein, 10 aa, Homo Sapiens
  sequence located in APOB at 2780-2789 and may interact with Sequence 656 in this patent.
GTTSANEAGI

SEQ ID NO: 656 - protein, 10 aa, Homo Sapiens
  sequence located in EYA3 at 171-180 and may interact with Sequence 655 in this patent.
NASLISTSST

SEQ ID NO: 657 - protein, 10 aa, Homo Sapiens
  sequence located in APOB at 941-950 and may interact with Sequence 658 in this patent.
TLHLVSTTKT

SEQ ID NO: 658 - protein, 10 aa, Homo Sapiens
  sequence located in EZH1 at 31-40 and may interact with Sequence 657 in this patent.
RFRRADEVKS

SEQ ID NO: 659 - protein, 10 aa, Homo Sapiens
  sequence located in APOB at 3339-3348 and may interact with Sequence 660 in this patent.
YDFSFKSSVI

SEQ ID NO: 660 - protein, 10 aa, Homo Sapiens
  sequence located in FABP2 at 25-34 and may interact with Sequence 659 in this patent.
IVKRKLAAHD

SEQ ID NO: 661 - protein, 10 aa, Homo Sapiens
  sequence located in APOB at 353-362 and may interact with Sequence 662 in this patent.
TELRGLSDEA

SEQ ID NO: 662 - protein, 10 aa, Homo Sapiens
  sequence located in FASN OR FAS at 1948-1957 and may interact with Sequence 661 in this patent.
GLIAEAAQLG

SEQ ID NO: 663 - protein, 10 aa, Homo Sapiens
  sequence located in APOB at 4460-4469 and may interact with Sequence 664 in this patent.
GKGKEKIAEL

SEQ ID NO: 664 - protein, 10 aa, Homo Sapiens
  sequence located in FER OR TYK3 at 203-212 and may interact with Sequence 663 in this patent.
TLPLLLDSLQ

SEQ ID NO: 665 - protein, 10 aa, Homo Sapiens
  sequence located in APOB at 4459-4468 and may interact with Sequence 666 in this patent.
DGKGKEKIAE

SEQ ID NO: 666 - protein, 10 aa, Homo Sapiens
  sequence located in FER OR TYK3 at 202-211 and may interact with Sequence 665 in this patent.
ITLPLLLDSL

SEQ ID NO: 667 - protein, 10 aa, Homo Sapiens
  sequence located in APOB at 3998-4007 and may interact with Sequence 668 in this patent.
STSAASPAVG

SEQ ID NO: 668 - protein, 10 aa, Homo Sapiens
  sequence located in FXR1 at 428-437 and may interact with Sequence 667 in this patent.
SYGGRGRGRR

SEQ ID NO: 669 - protein, 10 aa, Homo Sapiens
  sequence located in APOB at 3999-4008 and may interact with Sequence 670 in this patent.
TSAASPAVGT

SEQ ID NO: 670 - protein, 10 aa, Homo Sapiens
  sequence located in FXR1 at 427-436 and may interact with Sequence 669 in this patent.
GSYGGRGRGR

SEQ ID NO: 671 - protein, 10 aa, Homo Sapiens
  sequence located in APOB at 3996-4005 and may interact with Sequence 672 in this patent.
GISTSAASPA

SEQ ID NO: 672 - protein, 10 aa, Homo Sapiens
  sequence located in FXR1 at 428-437 and may interact with Sequence 671 in this patent.
SYGGRGRGRR

SEQ ID NO: 673 - protein, 10 aa, Homo Sapiens
  sequence located in APOB at 4131-4140 and may interact with Sequence 674 in this patent.
QKAASGTTGT

SEQ ID NO: 674 - protein, 10 aa, Homo Sapiens
  sequence located in GAS1 at 30-39 and may interact with Sequence 673 in this patent.
LLGSAPRGSG

SEQ ID NO: 675 - protein, 10 aa, Homo Sapiens
  sequence located in APOB at 2778-2787 and may interact with Sequence 676 in this patent.
GNGTTSANEA

SEQ ID NO: 676 - protein, 10 aa, Homo Sapiens
  sequence located in AGL OR GDE at 956-965 and may interact with Sequence 675 in this patent.
RLISRSGTIA

SEQ ID NO: 677 - protein, 10 aa, Homo Sapiens
  sequence located in APOB at 2301-2310 and may interact with Sequence 678 in this patent.
LGTTISFERI

SEQ ID NO: 678 - protein, 10 aa, Homo Sapiens
  sequence located in GIP at 112-121 and may interact with Sequence 677 in this patent.
NTLEGNCSSK

SEQ ID NO: 679 - protein, 10 aa, Homo Sapiens
  sequence located in APOB at 4464-4473 and may interact with Sequence 680 in this patent.
EKIAELSATA

SEQ ID NO: 680 - protein, 10 aa, Homo Sapiens
  sequence located in GRIK1 OR GLUR5 at 86-95 and may interact with Sequence 679 in this patent.
LFDSFEASRR

SEQ ID NO: 681 - protein, 10 aa, Homo Sapiens
  sequence located in APOB at 2136-2145 and may interact with Sequence 682 in this patent.
SHAKEKLTAL

SEQ ID NO: 682 - protein, 10 aa, Homo Sapiens
  sequence located in GPD2 at 464-473 and may interact with Sequence 681 in this patent.
TVGLFLQGGK

SEQ ID NO: 683 - protein, 10 aa, Homo Sapiens
  sequence located in APOB at 704-713 and may interact with Sequence 684 in this patent.
LFGKQGFFPD

SEQ ID NO: 684 - protein, 10 aa, Homo Sapiens
  sequence located in HMBS OR PBGD at 71-80 and may interact with Sequence 683 in this patent.
IGEKSLFTKE

SEQ ID NO: 685 - protein, 10 aa, Homo Sapiens
  sequence located in APOB at 794-803 and may interact with Sequence 686 in this patent.
LLGKLLLMGA

SEQ ID NO: 686 - protein, 10 aa, Homo Sapiens
  sequence located in MLL OR HRX OR ALL1 OR TRX1 OR HTRX at 2434-2443 and may interact with Sequence 685 in this patent.
KETFKEKHSS

SEQ ID NO: 687 - protein, 10 aa, Homo Sapiens
  sequence located in APOB at 3243-3252 and may interact with Sequence 688 in this patent.
PRTFQIPGYT

SEQ ID NO: 688 - protein, 10 aa, Homo Sapiens
  sequence located in HSST1 OR NDST1 OR HSST at 500-509 and may interact with Sequence 687 in this patent.
GSRELDRSIR

SEQ ID NO: 689 - protein, 10 aa, Homo Sapiens
  sequence located in APOB at 852-861 and may interact with Sequence 690 in this patent.
GVIAPGAKAG

SEQ ID NO: 690 - protein, 10 aa, Homo Sapiens
  sequence located in Unknown at 105-114 and may interact with Sequence 689 in this patent.
TDDSGTSLGP

SEQ ID NO: 691 - protein, 10 aa, Homo Sapiens
  sequence located in APOB at 3996-4005 and may interact with Sequence 692 in this patent.
GISTSAASPA

SEQ ID NO: 692 - protein, 10 aa, Homo Sapiens
  sequence located in HOX11L1 at 20-29 and may interact with Sequence 691 in this patent.
SGTCSARAYP

SEQ ID NO: 693 - protein, 10 aa, Homo Sapiens
  sequence located in APOB at 3997-4006 and may interact with Sequence 694 in this patent.
ISTSAASPAV

SEQ ID NO: 694 - protein, 10 aa, Homo Sapiens
  sequence located in HOX11L1 at 19-28 and may interact with Sequence 693 in this patent.
DSGTCSARAY

SEQ ID NO: 695 - protein, 10 aa, Homo Sapiens
  sequence located in APOB at 3032-3041 and may interact with Sequence 696 in this patent.
TLKNSLFFSA

SEQ ID NO: 696 - protein, 10 aa, Homo Sapiens
  sequence located in HOXC13 OR HOX3G at 23-32 and may interact with Sequence 695 in this patent.
SKFITKEKRR

SEQ ID NO: 697 - protein, 10 aa, Homo Sapiens
  sequence located in APOB at 3031-3040 and may interact with Sequence 698 in this patent.
GTLKNSLFFS

SEQ ID NO: 698 - protein, 10 aa, Homo Sapiens
  sequence located in HOXC13 OR HOX3G at 22-31 and may interact with Sequence 697 in this patent.
ASKFITKEKR

SEQ ID NO: 699 - protein, 10 aa, Homo Sapiens
  sequence located in APOB at 478-487 and may interact with Sequence 700 in this patent.
CTGDEDYTYL

SEQ ID NO: 700 - protein, 10 aa, Homo Sapiens
  sequence located in API1 OR IAP1 OR MIHC at 564-573 and may interact with Sequence 699 in this patent.
EVSIVFIPCG

SEQ ID NO: 701 - protein, 10 aa, Homo Sapiens
  sequence located in APOB at 478-487 and may interact with Sequence 702 in this patent.
CTGDEDYTYL

SEQ ID NO: 702 - protein, 10 aa, Homo Sapiens
  sequence located in API2 OR IAP2 OR MIHB at 578-587 and may interact with Sequence 701 in this patent.
EVSVVFIPCG

SEQ ID NO: 703 - protein, 10 aa, Homo Sapiens
  sequence located in APOB at 1608-1617 and may interact with Sequence 704 in this patent.
SLRFFSLLSG

SEQ ID NO: 704 - protein, 10 aa, Homo Sapiens
  sequence located in CAST at 388-397 and may interact with Sequence 703 in this patent.
PTEKTEESKA

SEQ ID NO: 705 - protein, 10 aa, Homo Sapiens
  sequence located in APOB at 2823-2832 and may interact with Sequence 706 in this patent.
ALKESVKFSS

SEQ ID NO: 706 - protein, 10 aa, Homo Sapiens
  sequence located in ICSBP1 at 268-277 and may interact with Sequence 705 in this patent.
RKLFGHLERG

SEQ ID NO: 707 - protein, 10 aa, Homo Sapiens
  sequence located in APOB at 3997-4006 and may interact with Sequence 708 in this patent.
ISTSAASPAV

SEQ ID NO: 708 - protein, 10 aa, Homo Sapiens
  sequence located in EIF4B at 24-33 and may interact with Sequence 707 in this patent.
DGGTGGGSTY

SEQ ID NO: 709 - protein, 10 aa, Homo Sapiens
  sequence located in APOB at 3999-4008 and may interact with Sequence 710 in this patent.
TSAASPAVGT

SEQ ID NO: 710 - protein, 10 aa, Homo Sapiens
  sequence located in KRT9 at 482-491 and may interact with Sequence 709 in this patent.
GSYGRGSRGG

SEQ ID NO: 711 - protein, 10 aa, Homo Sapiens
  sequence located in APOB at 3999-4008 and may interact with Sequence 712 in this patent.
TSAASPAVGT

SEQ ID NO: 712 - protein, 10 aa, Homo Sapiens
  sequence located in KRT9 at 542-551 and may interact with Sequence 711 in this patent.
SGGSGGGHSG

SEQ ID NO: 713 - protein, 10 aa, Homo Sapiens
  sequence located in APOB at 3999-4008 and may interact with Sequence 714 in this patent.
TSAASPAVGT

SEQ ID NO: 714 - protein, 10 aa, Homo Sapiens
  sequence located in KRT9 at 534-543 and may interact with Sequence 713 in this patent.
GGGSGGGHSG

SEQ ID NO: 715 - protein, 10 aa, Homo Sapiens
  sequence located in APOB at 3996-4005 and may interact with Sequence 716 in this patent.
GISTSAASPA

SEQ ID NO: 716 - protein, 10 aa, Homo Sapiens
  sequence located in KRT9 at 483-492 and may interact with Sequence 715 in this patent.
SYGRGSRGGS

SEQ ID NO: 717 - protein, 10 aa, Homo Sapiens
  sequence located in APOB at 2651-2660 and may interact with Sequence 718 in this patent.
TILNTFHIPS

SEQ ID NO: 718 - protein, 10 aa, Homo Sapiens
  sequence located in KRT7 at 304-313 and may interact with Sequence 717 in this patent.
RNEISEMNRA

SEQ ID NO: 719 - protein, 10 aa, Homo Sapiens
  sequence located in APOB at 1372-1381 and may interact with Sequence 720 in this patent.
SYSGGNTSTD

SEQ ID NO: 720 - protein, 10 aa, Homo Sapiens
  sequence located in PFKM at 417-426 and may interact with Sequence 719 in this patent.
AVRSAVRTGI

SEQ ID NO: 721 - protein, 10 aa, Homo Sapiens
  sequence located in APOB at 3962-3971 and may interact with Sequence 722 in this patent.
GKFEGLQEWE

SEQ ID NO: 722 - protein, 10 aa, Homo Sapiens
  sequence located in PRKAR2A OR PKR2 OR PRKAR2 at 273-282 and may interact with Sequence 721 in this patent.
LPFLKSLEFS

SEQ ID NO: 723 - protein, 10 aa, Homo Sapiens
  sequence located in APOB at 3963-3972 and may interact with Sequence 724 in this patent.
KFEGLQEWEG

SEQ ID NO: 724 - protein, 10 aa, Homo Sapiens
  sequence located in PRKAR2A OR PKR2 OR PRKAR2 at 272-281 and may interact with Sequence 723 in this patent.
SLPFLKSLEF

SEQ ID NO: 725 - protein, 10 aa, Homo Sapiens
  sequence located in APOB at 4258-4267 and may interact with Sequence 726 in this patent.
RKHKLIDVIS

SEQ ID NO: 726 - protein, 10 aa, Homo Sapiens
  sequence located in CSNK2A1 OR CK2A1 at 111-120 and may interact with Sequence 725 in this patent.
ALVFEYINNT

SEQ ID NO: 727 - protein, 10 aa, Homo Sapiens
  sequence located in APOB at 2653-2662 and may interact with Sequence 728 in this patent.
LNTFHIPSFT

SEQ ID NO: 728 - protein, 10 aa, Homo Sapiens
  sequence located in MKI67 at 318-327 and may interact with Sequence 727 in this patent.
GKGRDVESVQ

SEQ ID NO: 729 - protein, 10 aa, Homo Sapiens
  sequence located in APOB at 3383-3392 and may interact with Sequence 730 in this patent.
GTTRLTRKRG

SEQ ID NO: 730 - protein, 10 aa, Homo Sapiens
  sequence located in MYLK OR MLCK at 1203-1212 and may interact with Sequence 729 in this patent.
SRRPKSSLPP

SEQ ID NO: 731 - protein, 10 aa, Homo Sapiens
  sequence located in APOB at 996-1005 and may interact with Sequence 732 in this patent.
TGDTRLELEL

SEQ ID NO: 732 - protein, 10 aa, Homo Sapiens
  sequence located in PRKCI at 69-78 and may interact with Sequence 731 in this patent.
CTVSSQLELE

SEQ ID NO: 733 - protein, 10 aa, Homo Sapiens
  sequence located in APOB at 1906-1915 and may interact with Sequence 734 in this patent.
TIDAHTNGNG

SEQ ID NO: 734 - protein, 10 aa, Homo Sapiens
  sequence located in PRKCM at 558-567 and may interact with Sequence 733 in this patent.
RDISVSISVS

SEQ ID NO: 735 - protein, 10 aa, Homo Sapiens
  sequence located in APOB at 1905-1914 and may interact with Sequence 736 in this patent.
MTIDAHTNGN

SEQ ID NO: 736 - protein, 10 aa, Homo Sapiens
  sequence located in PRKCM at 557-566 and may interact with Sequence 735 in this patent.
HRDISVSISV

SEQ ID NO: 737 - protein, 10 aa, Homo Sapiens
  sequence located in APOB at 850-859 and may interact with Sequence 738 in this patent.
SSGVIAPGAK

SEQ ID NO: 738 - protein, 10 aa, Homo Sapiens
  sequence located in LAMC2 at 92-101 and may interact with Sequence 737 in this patent.
LSARCDNSGR

SEQ ID NO: 739 - protein, 10 aa, Homo Sapiens
  sequence located in APOB at 851-860 and may interact with Sequence 740 in this patent.
SGVIAPGAKA

SEQ ID NO: 740 - protein, 10 aa, Homo Sapiens
  sequence located in LAMC2 at 91-100 and may interact with Sequence 739 in this patent.
SLSARCDNSG

SEQ ID NO: 741 - protein, 10 aa, Homo Sapiens
  sequence located in APOB at 3998-4007 and may interact with Sequence 742 in this patent.
STSAASPAVG

SEQ ID NO: 742 - protein, 10 aa, Homo Sapiens
  sequence located in Unknown at 228-237 and may interact with Sequence 741 in this patent.
SYGGGSSGGG

SEQ ID NO: 743 - protein, 10 aa, Homo Sapiens
  sequence located in APOB at 3996-4005 and may interact with Sequence 744 in this patent.
GISTSAASPA

SEQ ID NO: 744 - protein, 10 aa, Homo Sapiens
  sequence located in Unknown at 228-237 and may interact with Sequence 743 in this patent.
SYGGGSSGGG

SEQ ID NO: 745 - protein, 10 aa, Homo Sapiens
  sequence located in APOB at 2778-2787 and may interact with Sequence 746 in this patent.
GNGTTSANEA

SEQ ID NO: 746 - protein, 10 aa, Homo Sapiens
  sequence located in MET at 752-761 and may interact with Sequence 745 in this patent.
SFISGGSTIT

SEQ ID NO: 747 - protein, 10 aa, Homo Sapiens
  sequence located in APOB at 1610-1619 and may interact with Sequence 748 in this patent.
RFFSLLSGSL

SEQ ID NO: 748 - protein, 10 aa, Homo Sapiens
  sequence located in MET at 301-310 and may interact with Sequence 747 in this patent.
TEKRKKRSTK

SEQ ID NO: 749 - protein, 10 aa, Homo Sapiens
  sequence located in APOB at 66-75 and may interact with Sequence 750 in this patent.
GTADSRSATR

SEQ ID NO: 750 - protein, 10 aa, Homo Sapiens
  sequence located in GRM5 OR MGLUR5 at 971-980 and may interact with Sequence 749 in this patent.
AGGVGATGGA

SEQ ID NO: 751 - protein, 10 aa, Homo Sapiens
  sequence located in APOB at 3998-4007 and may interact with Sequence 752 in this patent.
STSAASPAVG

SEQ ID NO: 752 - protein, 10 aa, Homo Sapiens
  sequence located in MTNR1B at 403-412 and may interact with Sequence 751 in this patent.
SYSRARRTRT

SEQ ID NO: 753 - protein, 10 aa, Homo Sapiens
  sequence located in APOB at 1242-1251 and may interact with Sequence 754 in this patent.
SGSLPYTQTL

SEQ ID NO: 754 - protein, 10 aa, Homo Sapiens
  sequence located in SLC16A6 OR MCT6 at 49-58 and may interact with Sequence 753 in this patent.
KSLSVWQRSG

SEQ ID NO: 755 - protein, 10 aa, Homo Sapiens
  sequence located in APOB at 1697-1706 and may interact with Sequence 756 in this patent.
FSLDGKAALT

SEQ ID NO: 756 - protein, 10 aa, Homo Sapiens
  sequence located in MOZ at 365-374 and may interact with Sequence 755 in this patent.
KRKITLSSQS

SEQ ID NO: 757 - protein, 10 aa, Homo Sapiens
  sequence located in APOB at 2307-2316 and may interact with Sequence 758 in this patent.
FERINDVLEH

SEQ ID NO: 758 - protein, 10 aa, Homo Sapiens
  sequence located in PHC at 413-422 and may interact with Sequence 757 in this patent.
KFSNIVDKFV

SEQ ID NO: 759 - protein, 10 aa, Homo Sapiens
  sequence located in APOB at 2306-2315 and may interact with Sequence 760 in this patent.
SFERINDVLE

SEQ ID NO: 760 - protein, 10 aa, Homo Sapiens
  sequence located in PHC at 412-421 and may interact with Sequence 759 in this patent.
GKFSNIVDKF

SEQ ID NO: 761 - protein, 10 aa, Homo Sapiens
  sequence located in APOB at 3996-4005 and may interact with Sequence 762 in this patent.
GISTSAASPA

SEQ ID NO: 762 - protein, 10 aa, Homo Sapiens
  sequence located in MT3 at 10-19 and may interact with Sequence 761 in this patent.
SGGSCTCADS

SEQ ID NO: 763 - protein, 10 aa, Homo Sapiens
  sequence located in APOB at 859-868 and may interact with Sequence 764 in this patent.
KAGVKLEVAN

SEQ ID NO: 764 - protein, 10 aa, Homo Sapiens
  sequence located in MCAM OR MUC18 at 1049-1058 and may interact with Sequence 763 in this patent.
ISNLQFNSSL

SEQ ID NO: 765 - protein, 10 aa, Homo Sapiens
  sequence located in APOB at 860-869 and may interact with Sequence 766 in this patent.
AGVKLEVANM

SEQ ID NO: 766 - protein, 10 aa, Homo Sapiens
  sequence located in MCAM OR MUC18 at 1048-1057 and may interact with Sequence 765 in this patent.
HISNLQFNSS

SEQ ID NO: 767 - protein, 10 aa, Homo Sapiens
  sequence located in APOB at 1537-1546 and may interact with Sequence 768 in this patent.
YEDGTLSLTS

SEQ ID NO: 768 - protein, 10 aa, Homo Sapiens
  sequence located in PCSK1 OR NEC1 at 295-304 and may interact with Sequence 767 in this patent.
GRQGKGSIFV

SEQ ID NO: 769 - protein, 10 aa, Homo Sapiens
  sequence located in APOB at 8-17 and may interact with Sequence 770 in this patent.
LLALLALPAL

SEQ ID NO: 770 - protein, 10 aa, Homo Sapiens
  sequence located in NEFL OR NFL at 510-519 and may interact with Sequence 769 in this patent.
EGGEGEEGEE

SEQ ID NO: 771 - protein, 10 aa, Homo Sapiens
  sequence located in APOB at 9-18 and may interact with Sequence 772 in this patent.
LALLALPALL

SEQ ID NO: 772 - protein, 10 aa, Homo Sapiens
  sequence located in NEFL OR NFL at 509-518 and may interact with Sequence 771 in this patent.
EEGGEGEEGE

SEQ ID NO: 773 - protein, 10 aa, Homo Sapiens
  sequence located in APOB at 10-19 and may interact with Sequence 774 in this patent.
ALLALPALLL

SEQ ID NO: 774 - protein, 10 aa, Homo Sapiens
  sequence located in NEFL OR NFL at 508-517 and may interact with Sequence 773 in this patent.
EEEGGEGEEG

SEQ ID NO: 775 - protein, 10 aa, Homo Sapiens
  sequence located in APOB at 3998-4007 and may interact with Sequence 776 in this patent.
STSAASPAVG

SEQ ID NO: 776 - protein, 10 aa, Homo Sapiens
  sequence located in SLC12A2 OR NKCC1 at 581-590 and may interact with Sequence 775 in this patent.
SYSRGSSRSR

SEQ ID NO: 777 - protein, 10 aa, Homo Sapiens
  sequence located in APOB at 4249-4258 and may interact with Sequence 778 in this patent.
LVITLPFELR

SEQ ID NO: 778 - protein, 10 aa, Homo Sapiens
  sequence located in NOP56 at 401-410 and may interact with Sequence 777 in this patent.
AEFEGEGDYE

SEQ ID NO: 779 - protein, 10 aa, Homo Sapiens
  sequence located in APOB at 3963-3972 and may interact with Sequence 780 in this patent.
KFEGLQEWEG

SEQ ID NO: 780 - protein, 10 aa, Homo Sapiens
  sequence located in Unknown at 66-75 and may interact with Sequence 779 in this patent.
FELAKLLPLP

SEQ ID NO: 781 - protein, 10 aa, Homo Sapiens
  sequence located in APOB at 2799-2808 and may interact with Sequence 782 in this patent.
SKLEVLNFDF

SEQ ID NO: 782 - protein, 10 aa, Homo Sapiens
  sequence located in NTAK at 295-304 and may interact with Sequence 781 in this patent.
RLQFNKVKVE

SEQ ID NO: 783 - protein, 10 aa, Homo Sapiens
  sequence located in APOB at 1755-1764 and may interact with Sequence 784 in this patent.
NSLNIAGLSL

SEQ ID NO: 784 - protein, 10 aa, Homo Sapiens
  sequence located in PIK3R2 at 624-633 and may interact with Sequence 783 in this patent.
VGKINRTQAE

SEQ ID NO: 785 - protein, 10 aa, Homo Sapiens
  sequence located in APOB at 1325-1334 and may interact with Sequence 786 in this patent.
SVGFHLPSRE

SEQ ID NO: 786 - protein, 10 aa, Homo Sapiens
  sequence located in PTAFR OR PAFR at 222-231 and may interact with Sequence 785 in this patent.
RNAEVKRRAL

SEQ ID NO: 787 - protein, 10 aa, Homo Sapiens
  sequence located in APOB at 1296-1305 and may interact with Sequence 788 in this patent.
IEIPLPFGGK

SEQ ID NO: 788 - protein, 10 aa, Homo Sapiens
  sequence located in PAI1 OR PLANH1 at 193-202 and may interact with Sequence 787 in this patent.
YFNGQWKTPF

SEQ ID NO: 789 - protein, 10 aa, Homo Sapiens
  sequence located in APOB at 1295-1304 and may interact with Sequence 790 in this patent.
KIEIPLPFGG

SEQ ID NO: 790 - protein, 10 aa, Homo Sapiens
  sequence located in PAI1 OR PLANH1 at 192-201 and may interact with Sequence 789 in this patent.
LYFNGQWKTP

SEQ ID NO: 791 - protein, 10 aa, Homo Sapiens
  sequence located in APOB at 3380-3389 and may interact with Sequence 792 in this patent.
KLEGTTRLTR

SEQ ID NO: 792 - protein, 10 aa, Homo Sapiens
  sequence located in PAP at 251-260 and may interact with Sequence 791 in this patent.
TCESSSPFQL

SEQ ID NO: 793 - protein, 10 aa, Homo Sapiens
  sequence located in APOB at 1701-1710 and may interact with Sequence 794 in this patent.
GKAALTELSL

SEQ ID NO: 794 - protein, 10 aa, Homo Sapiens
  sequence located in PITX3 OR PTX3 at 125-134 and may interact with Sequence 793 in this patent.
QAELCKGSFA

SEQ ID NO: 795 - protein, 10 aa, Homo Sapiens
  sequence located in APOB at 3690-3699 and may interact with Sequence 796 in this patent.
LDVTTSIGRR

SEQ ID NO: 796 - protein, 10 aa, Homo Sapiens
  sequence located in PKD1 at 848-857 and may interact with Sequence 795 in this patent.
QVDSGANATA

SEQ ID NO: 797 - protein, 10 aa, Homo Sapiens
  sequence located in APOB at 3689-3698 and may interact with Sequence 798 in this patent.
KLDVTTSIGR

SEQ ID NO: 798 - protein, 10 aa, Homo Sapiens
  sequence located in PKD1 at 847-856 and may interact with Sequence 797 in this patent.
LQVDSGANAT

SEQ ID NO: 799 - protein, 10 aa, Homo Sapiens
  sequence located in APOB at 1853-1862 and may interact with Sequence 800 in this patent.
ADTVAKVQGV

SEQ ID NO: 800 - protein, 10 aa, Homo Sapiens
  sequence located in PTB at 770-779 and may interact with Sequence 799 in this patent.
RVRDGLDLTD

SEQ ID NO: 801 - protein, 10 aa, Homo Sapiens
  sequence located in APOB at 4030-4039 and may interact with Sequence 802 in this patent.
SSPDKKLTIF

SEQ ID NO: 802 - protein, 10 aa, Homo Sapiens
  sequence located in PTPN2 OR PTPT at 684-693 and may interact with Sequence 801 in this patent.
TTRVLLQGNE

SEQ ID NO: 803 - protein, 10 aa, Homo Sapiens
  sequence located in APOB at 3696-3705 and may interact with Sequence 804 in this patent.
IGRRQHLRVS

SEQ ID NO: 804 - protein, 10 aa, Homo Sapiens
  sequence located in PTPRM OR PTPRL1 at 851-860 and may interact with Sequence 803 in this patent.
DTSSLVQSHT

SEQ ID NO: 805 - protein, 10 aa, Homo Sapiens
  sequence located in APOB at 3406-3415 and may interact with Sequence 806 in this patent.
VEGSHNSTVS

SEQ ID NO: 806 - protein, 10 aa, Homo Sapiens
  sequence located in RPL10A at 5-14 and may interact with Sequence 805 in this patent.
RHRRVVGTLH

SEQ ID NO: 807 - protein, 10 aa, Homo Sapiens
  sequence located in APOB at 1840-1849 and may interact with Sequence 808 in this patent.
YAISSAALSA

SEQ ID NO: 808 - protein, 10 aa, Homo Sapiens
  sequence located in ARHA OR ARH12 OR RHOA OR RHO12 at 11-20 and may interact with Sequence 807 in this patent.
VGDGACGKTC

SEQ ID NO: 809 - protein, 10 aa, Homo Sapiens
  sequence located in APOB at 1840-1849 and may interact with Sequence 810 in this patent.
YAISSAALSA

SEQ ID NO: 810 - protein, 10 aa, Homo Sapiens
  sequence located in ARHB OR ARH6 OR RHOB at 11-20 and may interact with Sequence 809 in this patent.
VGDGACGKTC

SEQ ID NO: 811 - protein, 10 aa, Homo Sapiens
  sequence located in APOB at 1840-1849 and may interact with Sequence 812 in this patent.
YAISSAALSA

SEQ ID NO: 812 - protein, 10 aa, Homo Sapiens
  sequence located in ARHD OR RHOD at 23-32 and may interact with Sequence 811 in this patent.
VGDGGCGKTS

SEQ ID NO: 813 - protein, 10 aa, Homo Sapiens
  sequence located in APOB at 791-800 and may interact with Sequence 814 in this patent.
DLQLLGKLLL

SEQ ID NO: 814 - protein, 10 aa, Homo Sapiens
  sequence located in RNASE1 OR RNS1 OR RIB1 at 149-158 and may interact with Sequence 813 in this patent.
KQELAEKLEV

SEQ ID NO: 815 - protein, 10 aa, Homo Sapiens
  sequence located in APOB at 4538-4547 and may interact with Sequence 816 in this patent.
LLKKLQSTTV

SEQ ID NO: 816 - protein, 10 aa, Homo Sapiens
  sequence located in RNASE1 OR RNS1 OR RIB1 at 237-246 and may interact with Sequence 815 in this patent.
HSSALELLQE

SEQ ID NO: 817 - protein, 10 aa, Homo Sapiens
  sequence located in APOB at 2823-2832 and may interact with Sequence 818 in this patent.
ALKESVKFSS

SEQ ID NO: 818 - protein, 10 aa, Homo Sapiens
  sequence located in Unknown at 548-557 and may interact with Sequence 817 in this patent.
TGKLNTLLQR

SEQ ID NO: 819 - protein, 10 aa, Homo Sapiens
  sequence located in APOB at 232-241 and may interact with Sequence 820 in this patent.
TRPLSTLISS

SEQ ID NO: 820 - protein, 10 aa, Homo Sapiens
  sequence located in RPS24 OR RPS19 at 87-96 and may interact with Sequence 819 in this patent.
RSREARKDRT

SEQ ID NO: 821 - protein, 10 aa, Homo Sapiens
  sequence located in APOB at 678-687 and may interact with Sequence 822 in this patent.
TAFGFASADL

SEQ ID NO: 822 - protein, 10 aa, Homo Sapiens
  sequence located in SMARCA2 OR SNF2L2 OR BRM OR SNF2A at 1585-1594 and may interact with Sequence 821 in this patent.
GSESESRSVK

SEQ ID NO: 823 - protein, 10 aa, Homo Sapiens
  sequence located in APOB at 677-686 and may interact with Sequence 824 in this patent.
LTAFGFASAD

SEQ ID NO: 824 - protein, 10 aa, Homo Sapiens
  sequence located in SMARCA2 OR SNF2L2 OR BRM OR SNF2A at 1584-1593 and may interact with Sequence 823 in this patent.
EGSESESRSV

SEQ ID NO: 825 - protein, 10 aa, Homo Sapiens
  sequence located in APOB at 3996-4005 and may interact with Sequence 826 in this patent.
GISTSAASPA

SEQ ID NO: 826 - protein, 10 aa, Homo Sapiens
  sequence located in SOX4 at 182-191 and may interact with Sequence 825 in this patent.
GGASGGGANS

SEQ ID NO: 827 - protein, 10 aa, Homo Sapiens
  sequence located in APOB at 3446-3455 and may interact with Sequence 828 in this patent.
GNTKSKPTVS

SEQ ID NO: 828 - protein, 10 aa, Homo Sapiens
  sequence located in DLG3 at 137-146 and may interact with Sequence 827 in this patent.
GNSGLGFSIA

SEQ ID NO: 829 - protein, 10 aa, Homo Sapiens
  sequence located in APOB at 3447-3456 and may interact with Sequence 830 in this patent.
NTKSKPTVSS

SEQ ID NO: 830 - protein, 10 aa, Homo Sapiens
  sequence located in DLG3 at 136-145 and may interact with Sequence 829 in this patent.
RGNSGLGFSI

SEQ ID NO: 831 - protein, 10 aa, Homo Sapiens
  sequence located in APOB at 3446-3455 and may interact with Sequence 832 in this patent.
GNTKSKPTVS

SEQ ID NO: 832 - protein, 10 aa, Homo Sapiens
  sequence located in DLG4 OR PSD95 at 230-239 and may interact with Sequence 831 in this patent.
GNSGLGFSIA

SEQ ID NO: 833 - protein, 10 aa, Homo Sapiens
  sequence located in APOB at 3447-3456 and may interact with Sequence 834 in this patent.
NTKSKPTVSS

SEQ ID NO: 834 - protein, 10 aa, Homo Sapiens
  sequence located in DLG4 OR PSD95 at 229-238 and may interact with Sequence 833 in this patent.
RGNSGLGFSI

SEQ ID NO: 835 - protein, 10 aa, Homo Sapiens
  sequence located in APOB at 135-144 and may interact with Sequence 836 in this patent.
IPEGKQVFLY

SEQ ID NO: 836 - protein, 10 aa, Homo Sapiens
  sequence located in STAT1 at 565-574 and may interact with Sequence 835 in this patent.
IKKHLLPLWN

SEQ ID NO: 837 - protein, 10 aa, Homo Sapiens
  sequence located in APOB at 3389-3398 and may interact with Sequence 838 in this patent.
RKRGLKLATA

SEQ ID NO: 838 - protein, 10 aa, Homo Sapiens
  sequence located in STK2 at 459-468 and may interact with Sequence 837 in this patent.
ALSPKLECSG

SEQ ID NO: 839 - protein, 10 aa, Homo Sapiens
  sequence located in APOB at 2798-2807 and may interact with Sequence 840 in this patent.
ESKLEVLNFD

SEQ ID NO: 840 - protein, 10 aa, Homo Sapiens
  sequence located in TPT1 at 245-254 and may interact with Sequence 839 in this patent.
VKVKNLEFGL

SEQ ID NO: 841 - protein, 10 aa, Homo Sapiens
  sequence located in APOB at 3361-3370 and may interact with Sequence 842 in this patent.
DIVAHLLSSS

SEQ ID NO: 842 - protein, 10 aa, Homo Sapiens
  sequence located in TFDP1 OR DP1 at 335-344 and may interact with Sequence 841 in this patent.
RRGKKMGHDV

SEQ ID NO: 843 - protein, 10 aa, Homo Sapiens
  sequence located in APOB at 3037-3046 and may interact with Sequence 844 in this patent.
LFFSAQPFEI

SEQ ID NO: 844 - protein, 10 aa, Homo Sapiens
  sequence located in TEAD2 OR TEF4 at 249-258 and may interact with Sequence 843 in this patent.
EKKGGLRELY

SEQ ID NO: 845 - protein, 10 aa, Homo Sapiens
  sequence located in APOB at 3172-3181 and may interact with Sequence 846 in this patent.
SVKAQYKKNK

SEQ ID NO: 846 - protein, 10 aa, Homo Sapiens
  sequence located in TBG at 7-16 and may interact with Sequence 845 in this patent.
LVLLVLGLHA

SEQ ID NO: 847 - protein, 10 aa, Homo Sapiens
  sequence located in APOB at 65-74 and may interact with Sequence 848 in this patent.
PGTADSRSAT

SEQ ID NO: 848 - protein, 10 aa, Homo Sapiens
  sequence located in THRSP at 43-52 and may interact with Sequence 847 in this patent.
GRRTAICRAG

SEQ ID NO: 849 - protein, 10 aa, Homo Sapiens
  sequence located in APOB at 1504-1513 and may interact with Sequence 850 in this patent.
SCQRDPNTGR

SEQ ID NO: 850 - protein, 10 aa, Homo Sapiens
  sequence located in TNFSF7 OR CD70 OR CD27LG OR CD27L at 126-135 and may interact with Sequence 849 in this patent.
TTLAVGICSP

SEQ ID NO: 851 - protein, 10 aa, Homo Sapiens
  sequence located in APOB at 20-29 and may interact with Sequence 852 in this patent.
LLLAGARAEE

SEQ ID NO: 852 - protein, 10 aa, Homo Sapiens
  sequence located in TRIP4 at 69-78 and may interact with Sequence 851 in this patent.
EQEGSGPCLF

SEQ ID NO: 853 - protein, 10 aa, Homo Sapiens
  sequence located in APOB at 3479-3488 and may interact with Sequence 854 in this patent.
HKLSLESLTS

SEQ ID NO: 854 - protein, 10 aa, Homo Sapiens
  sequence located in NTRK2 OR TRKB at 539-548 and may interact with Sequence 853 in this patent.
VLKRELGEGA

SEQ ID NO: 855 - protein, 10 aa, Homo Sapiens
  sequence located in APOB at 3478-3487 and may interact with Sequence 856 in this patent.
DHKLSLESLT

SEQ ID NO: 856 - protein, 10 aa, Homo Sapiens
  sequence located in NTRK2 OR TRKB at 538-547 and may interact with Sequence 855 in this patent.
IVLKRELGEG

SEQ ID NO: 857 - protein, 10 aa, Homo Sapiens
  sequence located in APOB at 3477-3486 and may interact with Sequence 858 in this patent.
VDHKLSLESL

SEQ ID NO: 858 - protein, 10 aa, Homo Sapiens
  sequence located in NTRK2 OR TRKB at 537-546 and may interact with Sequence 857 in this patent.
NIVLKRELGE

SEQ ID NO: 859 - protein, 10 aa, Homo Sapiens
  sequence located in APOB at 3479-3488 and may interact with Sequence 860 in this patent.
HKLSLESLTS

SEQ ID NO: 860 - protein, 10 aa, Homo Sapiens
  sequence located in NTRK3 OR TRKC at 539-548 and may interact with Sequence 859 in this patent.
VLKRELGEGA

SEQ ID NO: 861 - protein, 10 aa, Homo Sapiens
  sequence located in APOB at 3478-3487 and may interact with Sequence 862 in this patent.
DHKLSLESLT

SEQ ID NO: 862 - protein, 10 aa, Homo Sapiens
  sequence located in NTRK3 OR TRKC at 538-547 and may interact with Sequence 861 in this patent.
IVLKRELGEG

SEQ ID NO: 863 - protein, 10 aa, Homo Sapiens
  sequence located in APOB at 3477-3486 and may interact with Sequence 864 in this patent.
VDHKLSLESL

SEQ ID NO: 864 - protein, 10 aa, Homo Sapiens
  sequence located in NTRK3 OR TRKC at 537-546 and may interact with Sequence 863 in this patent.
DIVLKRELGE

SEQ ID NO: 865 - protein, 10 aa, Homo Sapiens
  sequence located in APOB at 3476-3485 and may interact with Sequence 866 in this patent.
AVDHKLSLES

SEQ ID NO: 866 - protein, 10 aa, Homo Sapiens
  sequence located in NTRK3 OR TRKC at 536-545 and may interact with Sequence 865 in this patent.
RDIVLKRELG

SEQ ID NO: 867 - protein, 10 aa, Homo Sapiens
  sequence located in APOB at 385-394 and may interact with Sequence 868 in this patent.
CGQPQCSTHI

SEQ ID NO: 868 - protein, 10 aa, Homo Sapiens
  sequence located in UQCRC2 at 239-248 and may interact with Sequence 867 in this patent.
NMRGGLGLSG

SEQ ID NO: 869 - protein, 10 aa, Homo Sapiens
  sequence located in APOB at 554-563 and may interact with Sequence 870 in this patent.
PGDKRLAAYL

SEQ ID NO: 870 - protein, 10 aa, Homo Sapiens
  sequence located in UQCRC2 at 395-404 and may interact with Sequence 869 in this patent.
EVGSQALVAG

SEQ ID NO: 871 - protein, 10 aa, Homo Sapiens
  sequence located in APOB at 3597-3606 and may interact with Sequence 872 in this patent.
SALVQVHASQ

SEQ ID NO: 872 - protein, 10 aa, Homo Sapiens
  sequence located in UMOD at 61-70 and may interact with Sequence 871 in this patent.
LTCVDLDECA

SEQ ID NO: 873 - protein, 10 aa, Homo Sapiens
  sequence located in APOB at 3598-3607 and may interact with Sequence 874 in this patent.
ALVQVHASQP

SEQ ID NO: 874 - protein, 10 aa, Homo Sapiens
  sequence located in UMOD at 60-69 and may interact with Sequence 873 in this patent.
GLTCVDLDEC

SEQ ID NO: 875 - protein, 10 aa, Homo Sapiens
  sequence located in APOB at 1865-1874 and may interact with Sequence 876 in this patent.
SHRLNTDIAG

SEQ ID NO: 876 - protein, 10 aa, Homo Sapiens
  sequence located in USF2 at 113-122 and may interact with Sequence 875 in this patent.
AVTQVGVDGA

SEQ ID NO: 877 - protein, 10 aa, Homo Sapiens
  sequence located in APOB at 1543-1552 and may interact with Sequence 878 in this patent.
SLTSTSDLQS

SEQ ID NO: 878 - protein, 10 aa, Homo Sapiens
  sequence located in LCN1 OR VEGP at 46-55 and may interact with Sequence 877 in this patent.
TLQITCRGQR

SEQ ID NO: 879 - protein, 10 aa, Homo Sapiens
  sequence located in APOB at 1544-1553 and may interact with Sequence 880 in this patent.
LTSTSDLQSG

SEQ ID NO: 880 - protein, 10 aa, Homo Sapiens
  sequence located in LCN1 OR VEGP at 45-54 and may interact with Sequence 879 in this patent.
TTLQITCRGQ

SEQ ID NO: 881 - protein, 10 aa, Homo Sapiens
  sequence located in APOB at 1545-1554 and may interact with Sequence 882 in this patent.
TSTSDLQSGI

SEQ ID NO: 882 - protein, 10 aa, Homo Sapiens
  sequence located in LCN1 OR VEGP at 44-53 and may interact with Sequence 881 in this patent.
NTTLQITCRG

SEQ ID NO: 883 - protein, 10 aa, Homo Sapiens
  sequence located in APOB at 2579-2588 and may interact with Sequence 884 in this patent.
ALVEQGFTVP

SEQ ID NO: 884 - protein, 10 aa, Homo Sapiens
  sequence located in VCL at 537-546 and may interact with Sequence 883 in this patent.
RQDLLAKCDR

SEQ ID NO: 885 - protein, 10 aa, Homo Sapiens
  sequence located in APOB at 980-989 and may interact with Sequence 886 in this patent.
AYSNASSTDS

SEQ ID NO: 886 - protein, 10 aa, Homo Sapiens
  sequence located in F8VWF OR VWF at 438-447 and may interact with Sequence 885 in this patent.
AVCTRSVTVR

SEQ ID NO: 887 - protein, 10 aa, Homo Sapiens
  sequence located in APOB at 1955-1964 and may interact with Sequence 888 in this patent.
VSRKSISAAL

SEQ ID NO: 888 - protein, 10 aa, Homo Sapiens
  sequence located in SLC16A2 OR XPCT at 15-24 and may interact with Sequence 887 in this patent.
EGSRDRLSRD

SEQ ID NO: 889 - protein, 10 aa, Homo Sapiens
  sequence located in APOB at 1155-1164 and may interact with Sequence 890 in this patent.
TAYGSTVSKR

SEQ ID NO: 890 - protein, 10 aa, Homo Sapiens
  sequence located in XRCC1 at 487-496 and may interact with Sequence 889 in this patent.
GRIAARNRLA

SEQ ID NO: 891 - protein, 10 aa, Homo Sapiens
  sequence located in APOC1 at 5-14 and may interact with Sequence 892 in this patent.
LSLPVLVVVL

SEQ ID NO: 892 - protein, 10 aa, Homo Sapiens
  sequence located in COL11A1 at 268-277 and may interact with Sequence 891 in this patent.
EYDYEYGEAE

SEQ ID NO: 893 - protein, 10 aa, Homo Sapiens
  sequence located in APOC1 at 52-61 and may interact with Sequence 894 in this patent.
ISRIKQSELS

SEQ ID NO: 894 - protein, 10 aa, Homo Sapiens
  sequence located in CREBBP OR CBP at 49-58 and may interact with Sequence 893 in this patent.
GELGLLNSGN

SEQ ID NO: 895 - protein, 10 aa, Homo Sapiens
  sequence located in APOC1 at 53-62 and may interact with Sequence 896 in this patent.
SRIKQSELSA

SEQ ID NO: 896 - protein, 10 aa, Homo Sapiens
  sequence located in CREBBP OR CBP at 48-57 and may interact with Sequence 895 in this patent.
GGELGLLNSG

SEQ ID NO: 897 - protein, 10 aa, Homo Sapiens
  sequence located in ADRBK1 OR GRK2 OR BARK1 OR BARK at 48-57 and may interact with Sequence 898 in this patent.
EDRGEVTFEK

SEQ ID NO: 898 - protein, 10 aa, Homo Sapiens
  sequence located in ACVR2B at 328-337 and may interact with Sequence 897 in this patent.
LLKSDLTAVL

SEQ ID NO: 899 - protein, 10 aa, Homo Sapiens
  sequence located in ADRBK1 OR GRK2 OR BARK1 OR BARK at 19-28 and may interact with Sequence 900 in this patent.
KSKATPAARA

SEQ ID NO: 900 - protein, 10 aa, Homo Sapiens
  sequence located in CACNA1B OR CACNL1A5 OR CACH5 at 2318-2327 and may interact with Sequence 899 in this patent.
LGLSSGGRAR

SEQ ID NO: 901 - protein, 10 aa, Homo Sapiens
  sequence located in ADRBK1 OR GRK2 OR BARK1 OR BARK at 205-214 and may interact with Sequence 902 in this patent.
VYGCRKRDTG

SEQ ID NO: 902 - protein, 10 aa, Homo Sapiens
  sequence located in Unknown at 554-563 and may interact with Sequence 901 in this patent.
ARISLARAVY

SEQ ID NO: 903 - protein, 10 aa, Homo Sapiens
  sequence located in ADRBK1 OR GRK2 OR BARK1 OR BARK at 434-443 and may interact with Sequence 904 in this patent.
NRRLGCLGRG

SEQ ID NO: 904 - protein, 10 aa, Homo Sapiens
  sequence located in CLTC OR CLH17 at 404-413 and may interact with Sequence 903 in this patent.
VPAQPGQTSP

SEQ ID NO: 905 - protein, 10 aa, Homo Sapiens
  sequence located in ADRBK1 OR GRK2 OR BARK1 OR BARK at 331-340 and may interact with Sequence 906 in this patent.
VRISDLGLAC

SEQ ID NO: 906 - protein, 10 aa, Homo Sapiens
  sequence located in C5 at 1552-1561 and may interact with Sequence 905 in this patent.
ACKPEIAYAY

SEQ ID NO: 907 - protein, 10 aa, Homo Sapiens
  sequence located in ADRBK1 OR GRK2 OR BARK1 OR BARK at 384-393 and may interact with Sequence 908 in this patent.
LLRGHSPFRQ

SEQ ID NO: 908 - protein, 10 aa, Homo Sapiens
  sequence located in EIF2S1 OR EIF2A at 84-93 and may interact with Sequence 907 in this patent.
LSKRRVSPEE

SEQ ID NO: 909 - protein, 10 aa, Homo Sapiens
  sequence located in ADRBK1 OR GRK2 OR BARK1 OR BARK at 20-29 and may interact with Sequence 910 in this patent.
SKATPAARAS

SEQ ID NO: 910 - protein, 10 aa, Homo Sapiens
  sequence located in KRT9 at 473-482 and may interact with Sequence 909 in this patent.
GLGGRGGSGG

SEQ ID NO: 911 - protein, 10 aa, Homo Sapiens
  sequence located in ADRBK1 OR GRK2 OR BARK1 OR BARK at 20-29 and may interact with Sequence 912 in this patent.
SKATPAARAS

SEQ ID NO: 912 - protein, 10 aa, Homo Sapiens
  sequence located in KRT10 at 59-68 and may interact with Sequence 911 in this patent.
RGSSGGGCFG

SEQ ID NO: 913 - protein, 10 aa, Homo Sapiens
  sequence located in ADRBK1 OR GRK2 OR BARK1 OR BARK at 21-30 and may interact with Sequence 914 in this patent.
KATPAARASK

SEQ ID NO: 914 - protein, 10 aa, Homo Sapiens
  sequence located in KRT2E at 81-90 and may interact with Sequence 913 in this patent.
FGGGRSSCGF

SEQ ID NO: 915 - protein, 10 aa, Homo Sapiens
  sequence located in ADRBK1 OR GRK2 OR BARK1 OR BARK at 20-29 and may interact with Sequence 916 in this patent.
SKATPAARAS

SEQ ID NO: 916 - protein, 10 aa, Homo Sapiens
  sequence located in KRT2E at 80-89 and may interact with Sequence 915 in this patent.
GFGGGRSSCG

SEQ ID NO: 917 - protein, 10 aa, Homo Sapiens
  sequence located in ADRBK1 OR GRK2 OR BARK1 OR BARK at 20-29 and may interact with Sequence 918 in this patent.
SKATPAARAS

SEQ ID NO: 918 - protein, 10 aa, Homo Sapiens
  sequence located in LHB at 105-114 and may interact with Sequence 917 in this patent.
ALSCRCGPCR

SEQ ID NO: 919 - protein, 10 aa, Homo Sapiens
  sequence located in ADRBK1 OR GRK2 OR BARK1 OR BARK at 382-391 and may interact with Sequence 920 in this patent.
FKLLRGHSPF

SEQ ID NO: 920 - protein, 10 aa, Homo Sapiens
  sequence located in MKLP1 at 628-637 and may interact with Sequence 919 in this patent.
ERRVAAKQLE

SEQ ID NO: 921 - protein, 10 aa, Homo Sapiens
  sequence located in ADRBK1 OR GRK2 OR BARK1 OR BARK at 22-31 and may interact with Sequence 922 in this patent.
ATPAARASKK

SEQ ID NO: 922 - protein, 10 aa, Homo Sapiens
  sequence located in MPPA at 11-20 and may interact with Sequence 921 in this patent.
LLRGSGSWGC

SEQ ID NO: 923 - protein, 10 aa, Homo Sapiens
  sequence located in ADRBK1 OR GRK2 OR BARK1 OR BARK at 203-212 and may interact with Sequence 924 in this patent.
GEVYGCRKRD

SEQ ID NO: 924 - protein, 10 aa, Homo Sapiens
  sequence located in PKD1 at 291-300 and may interact with Sequence 923 in this patent.
AFHIAAPLPV

SEQ ID NO: 925 - protein, 10 aa, Homo Sapiens
  sequence located in ADRBK1 OR GRK2 OR BARK1 OR BARK at 435-444 and may interact with Sequence 926 in this patent.
RRLGCLGRGA

SEQ ID NO: 926 - protein, 10 aa, Homo Sapiens
  sequence located in ARHGAP6 OR RHOGAP6 at 533-542 and may interact with Sequence 925 in this patent.
SSKSRESSPG

SEQ ID NO: 927 - protein, 10 aa, Homo Sapiens
  sequence located in ADRBK1 OR GRK2 OR BARK1 OR BARK at 60-69 and may interact with Sequence 928 in this patent.
SQKLGYLLFR

SEQ ID NO: 928 - protein, 10 aa, Homo Sapiens
  sequence located in POLR2C OR A-152E5.7 at 152-161 and may interact with Sequence 927 in this patent.
TKEEVTELLA

SEQ ID NO: 929 - protein, 10 aa, Homo Sapiens
  sequence located in ADRBK1 OR GRK2 OR BARK1 OR BARK at 436-445 and may interact with Sequence 930 in this patent.
RLGCLGRGAQ

SEQ ID NO: 930 - protein, 10 aa, Homo Sapiens
  sequence located in TCOF1 at 96-105 and may interact with Sequence 929 in this patent.
AETAKATPRL

SEQ ID NO: 931 - protein, 10 aa, Homo Sapiens
  sequence located in ADRBK1 OR GRK2 OR BARK1 OR BARK at 313-322 and may interact with Sequence 932 in this patent.
VVYRDLKPAN

SEQ ID NO: 932 - protein, 10 aa, Homo Sapiens
  sequence located in TFPI2 at 95-104 and may interact with Sequence 931 in this patent.
VCRLQVSVDD

SEQ ID NO: 933 - protein, 10 aa, Homo Sapiens
  sequence located in ADRBK1 OR GRK2 OR BARK1 OR BARK at 415-424 and may interact with Sequence 934 in this patent.
DSFSPELHSL

SEQ ID NO: 934 - protein, 10 aa, Homo Sapiens
  sequence located in TPP2 at 1209-1218 and may interact with Sequence 933 in this patent.
IAETRFEVAQ

SEQ ID NO: 935 - protein, 10 aa, Homo Sapiens
  sequence located in ADRBK1 OR GRK2 OR BARK1 OR BARK at 435-444 and may interact with Sequence 936 in this patent.
RRLGCLGRGA

SEQ ID NO: 936 - protein, 10 aa, Homo Sapiens
  sequence located in KIAA0026 at 89-98 and may interact with Sequence 935 in this patent.
GSTSEAPQPP

SEQ ID NO: 937 - protein, 10 aa, Homo Sapiens
  sequence located in ADRBK2 OR GRK3 OR BARK2 at 434-443 and may interact with Sequence 938 in this patent.
SKRLGCHGGG

SEQ ID NO: 938 - protein, 10 aa, Homo Sapiens
  sequence located in ACRV1 at 323-332 and may interact with Sequence 937 in this patent.
ASSVTPESLR

SEQ ID NO: 939 - protein, 10 aa, Homo Sapiens
  sequence located in ADRBK2 OR GRK3 OR BARK2 at 22-31 and may interact with Sequence 940 in this patent.
ATPAARASKR

SEQ ID NO: 940 - protein, 10 aa, Homo Sapiens
  sequence located in SLC4A3 OR AE3 at 293-302 and may interact with Sequence 939 in this patent.
GGRGSPSGLA

SEQ ID NO: 941 - protein, 10 aa, Homo Sapiens
  sequence located in ADRBK2 OR GRK3 OR BARK2 at 609-618 and may interact with Sequence 942 in this patent.
VEETQIKDKK

SEQ ID NO: 942 - protein, 10 aa, Homo Sapiens
  sequence located in Unknown at 88-97 and may interact with Sequence 941 in this patent.
NLLRLYFILL

SEQ ID NO: 943 - protein, 10 aa, Homo Sapiens
  sequence located in ADRBK2 OR GRK3 OR BARK2 at 608-617 and may interact with Sequence 944 in this patent.
SVEETQIKDK

SEQ ID NO: 944 - protein, 10 aa, Homo Sapiens
  sequence located in Unknown at 87-96 and may interact with Sequence 943 in this patent.
RNLLRLYFIL

SEQ ID NO: 945 - protein, 10 aa, Homo Sapiens
  sequence located in ADRBK2 OR GRK3 OR BARK2 at 19-28 and may interact with Sequence 946 in this patent.
KSKATPAARA

SEQ ID NO: 946 - protein, 10 aa, Homo Sapiens
  sequence located in CACNA1B OR CACNL1A5 OR CACH5 at 2318-2327 and may interact with Sequence 945 in this patent.
LGLSSGGRAR

SEQ ID NO: 947 - protein, 10 aa, Homo Sapiens
  sequence located in ADRBK2 OR GRK3 OR BARK2 at 205-214 and may interact with Sequence 948 in this patent.
VYGCRKADTG

SEQ ID NO: 948 - protein, 10 aa, Homo Sapiens
  sequence located in Unknown at 554-563 and may interact with Sequence 947 in this patent.
ARISLARAVY

SEQ ID NO: 949 - protein, 10 aa, Homo Sapiens
  sequence located in ADRBK2 OR GRK3 OR BARK2 at 679-688 and may interact with Sequence 950 in this patent.
SLCHRNSNGL

SEQ ID NO: 950 - protein, 10 aa, Homo Sapiens
  sequence located in POLG OR MDP1 at 182-191 and may interact with Sequence 949 in this patent.
GEAVPVAIPE

SEQ ID NO: 951 - protein, 10 aa, Homo Sapiens
  sequence located in ADRBK2 OR GRK3 OR BARK2 at 103-112 and may interact with Sequence 952 in this patent.
CRSRQIYDAY

SEQ ID NO: 952 - protein, 10 aa, Homo Sapiens
  sequence located in EIF2B5 OR EIF2BE at 33-42 and may interact with Sequence 951 in this patent.
RPTSLNVVRI

SEQ ID NO: 953 - protein, 10 aa, Homo Sapiens
  sequence located in ADRBK2 OR GRK3 OR BARK2 at 41-50 and may interact with Sequence 954 in this patent.
SVMQKYLAER

SEQ ID NO: 954 - protein, 10 aa, Homo Sapiens
  sequence located in FECH at 229-238 and may interact with Sequence 953 in this patent.
THHLLIQCFA

SEQ ID NO: 955 - protein, 10 aa, Homo Sapiens
  sequence located in ADRBK2 OR GRK3 OR BARK2 at 40-49 and may interact with Sequence 956 in this patent.
RSVMQKYLAE

SEQ ID NO: 956 - protein, 10 aa, Homo Sapiens
  sequence located in FECH at 228-237 and may interact with Sequence 955 in this patent.
PTHHLLIQCF

SEQ ID NO: 957 - protein, 10 aa, Homo Sapiens
  sequence located in ADRBK2 OR GRK3 OR BARK2 at 384-393 and may interact with Sequence 958 in this patent.
LLRGHSPFRQ

SEQ ID NO: 958 - protein, 10 aa, Homo Sapiens
  sequence located in EIF2S1 OR EIF2A at 84-93 and may interact with Sequence 957 in this patent.
LSKRRVSPEE

SEQ ID NO: 959 - protein, 10 aa, Homo Sapiens
  sequence located in ADRBK2 OR GRK3 OR BARK2 at 20-29 and may interact with Sequence 960 in this patent.
SKATPAARAS

SEQ ID NO: 960 - protein, 10 aa, Homo Sapiens
  sequence located in KRT9 at 473-482 and may interact with Sequence 959 in this patent.
GLGGRGGSGG

SEQ ID NO: 961 - protein, 10 aa, Homo Sapiens
  sequence located in ADRBK2 OR GRK3 OR BARK2 at 20-29 and may interact with Sequence 962 in this patent.
SKATPAARAS

SEQ ID NO: 962 - protein, 10 aa, Homo Sapiens
  sequence located in KRT10 at 59-68 and may interact with Sequence 961 in this patent.
RGSSGGGCFG

SEQ ID NO: 963 - protein, 10 aa, Homo Sapiens
  sequence located in ADRBK2 OR GRK3 OR BARK2 at 22-31 and may interact with Sequence 964 in this patent.
ATPAARASKR

SEQ ID NO: 964 - protein, 10 aa, Homo Sapiens
  sequence located in KRT2E at 82-91 and may interact with Sequence 963 in this patent.
GGGRSSCGFA

SEQ ID NO: 965 - protein, 10 aa, Homo Sapiens
  sequence located in ADRBK2 OR GRK3 OR BARK2 at 21-30 and may interact with Sequence 966 in this patent.
KATPAARASK

SEQ ID NO: 966 - protein, 10 aa, Homo Sapiens
  sequence located in KRT2E at 81-90 and may interact with Sequence 965 in this patent.
FGGGRSSCGF

SEQ ID NO: 967 - protein, 10 aa, Homo Sapiens
  sequence located in ADRBK2 OR GRK3 OR BARK2 at 20-29 and may interact with Sequence 968 in this patent.
SKATPAARAS

SEQ ID NO: 968 - protein, 10 aa, Homo Sapiens
  sequence located in KRT2E at 80-89 and may interact with Sequence 967 in this patent.
GFGGGRSSCG

SEQ ID NO: 969 - protein, 10 aa, Homo Sapiens
  sequence located in ADRBK2 OR GRK3 OR BARK2 at 20-29 and may interact with Sequence 970 in this patent.
SKATPAARAS

SEQ ID NO: 970 - protein, 10 aa, Homo Sapiens
  sequence located in LHB at 105-114 and may interact with Sequence 969 in this patent.
ALSCRCGPCR

SEQ ID NO: 971 - protein, 10 aa, Homo Sapiens
  sequence located in ADRBK2 OR GRK3 OR BARK2 at 641-650 and may interact with Sequence 972 in this patent.
VQWKKELNET

SEQ ID NO: 972 - protein, 10 aa, Homo Sapiens
  sequence located in MPI at 92-101 and may interact with Sequence 971 in this patent.
NLPFLFKVLS

SEQ ID NO: 973 - protein, 10 aa, Homo Sapiens
  sequence located in ADRBK2 OR GRK3 OR BARK2 at 382-391 and may interact with Sequence 974 in this patent.
FKLLRGHSPF

SEQ ID NO: 974 - protein, 10 aa, Homo Sapiens
  sequence located in MKLP1 at 628-637 and may interact with Sequence 973 in this patent.
ERRVAAKQLE

SEQ ID NO: 975 - protein, 10 aa, Homo Sapiens
  sequence located in ADRBK2 OR GRK3 OR BARK2 at 66-75 and may interact with Sequence 976 in this patent.
LLFKDFCLNE

SEQ ID NO: 976 - protein, 10 aa, Homo Sapiens
  sequence located in MYH6 OR MYHCA at 43-52 and may interact with Sequence 975 in this patent.
KEEFVKAKIL

SEQ ID NO: 977 - protein, 10 aa, Homo Sapiens
  sequence located in ADRBK2 OR GRK3 OR BARK2 at 432-441 and may interact with Sequence 978 in this patent.
DVSKRLGCHG

SEQ ID NO: 978 - protein, 10 aa, Homo Sapiens
  sequence located in PZP at 865-874 and may interact with Sequence 977 in this patent.
TVTPKTLGNV

SEQ ID NO: 979 - protein, 10 aa, Homo Sapiens
  sequence located in ADRBK2 OR GRK3 OR BARK2 at 137-146 and may interact with Sequence 980 in this patent.
SKKQVTSTLF

SEQ ID NO: 980 - protein, 10 aa, Homo Sapiens
  sequence located in RRM1 OR RR1 at 322-331 and may interact with Sequence 979 in this patent.
EQRARDLFFA

SEQ ID NO: 981 - protein, 10 aa, Homo Sapiens
  sequence located in ADRBK2 OR GRK3 OR BARK2 at 427-436 and may interact with Sequence 982 in this patent.
GLLQRDVSKR

SEQ ID NO: 982 - protein, 10 aa, Homo Sapiens
  sequence located in SRC OR SRC1 at 300-309 and may interact with Sequence 981 in this patent.
AEKLPINRLA

SEQ ID NO: 983 - protein, 10 aa, Homo Sapiens
  sequence located in ADRBK2 OR GRK3 OR BARK2 at 435-444 and may interact with Sequence 984 in this patent.
KRLGCHGGGS

SEQ ID NO: 984 - protein, 10 aa, Homo Sapiens
  sequence located in EPRS OR QPRS OR GLNS OR PARS at 1398-1407 and may interact with Sequence 983 in this patent.
GAPSMGAKSL

SEQ ID NO: 985 - protein, 10 aa, Homo Sapiens
  sequence located in ADRBK2 OR GRK3 OR BARK2 at 313-322 and may interact with Sequence 986 in this patent.
VVYRDLKPAN

SEQ ID NO: 986 - protein, 10 aa, Homo Sapiens
  sequence located in TFPI2 at 95-104 and may interact with Sequence 985 in this patent.
VCRLQVSVDD

SEQ ID NO: 987 - protein, 10 aa, Homo Sapiens
  sequence located in ARRB1 OR ARR1 at 108-117 and may interact with Sequence 988 in this patent.
KLGQHAHPFF

SEQ ID NO: 988 - protein, 10 aa, Homo Sapiens
  sequence located in CYP2E1 at 71-80 and may interact with Sequence 987 in this patent.
EEGMRVLTQL

SEQ ID NO: 989 - protein, 10 aa, Homo Sapiens
  sequence located in ARRB1 OR ARR1 at 285-294 and may interact with Sequence 990 in this patent.
KRGLALDGKL

SEQ ID NO: 990 - protein, 10 aa, Homo Sapiens
  sequence located in Unknown at 375-384 and may interact with Sequence 989 in this patent.
FTAEGEVTFK

SEQ ID NO: 991 - protein, 10 aa, Homo Sapiens
  sequence located in ARRB1 OR ARR1 at 147-156 and may interact with Sequence 992 in this patent.
IRAFCAKSLE

SEQ ID NO: 992 - protein, 10 aa, Homo Sapiens
  sequence located in FCGRT OR FCRN at 102-111 and may interact with Sequence 991 in this patent.
FKALGGKGPY

SEQ ID NO: 993 - protein, 10 aa, Homo Sapiens
  sequence located in ARRB1 OR ARR1 at 137-146 and may interact with Sequence 994 in this patent.
TGKACGVDFE

SEQ ID NO: 994 - protein, 10 aa, Homo Sapiens
  sequence located in Unknown at 208-217 and may interact with Sequence 993 in this patent.
SPLRATDVKL

SEQ ID NO: 995 - protein, 10 aa, Homo Sapiens
  sequence located in ARRB1 OR ARR1 at 15-24 and may interact with Sequence 996 in this patent.
PNCKLTVYLG

SEQ ID NO: 996 - protein, 10 aa, Homo Sapiens
  sequence located in IDE at 111-120 and may interact with Sequence 995 in this patent.
RVALKGNIET

SEQ ID NO: 997 - protein, 10 aa, Homo Sapiens
  sequence located in ARRB1 OR ARR1 at 180-189 and may interact with Sequence 998 in this patent.
GPQPSAETTP

SEQ ID NO: 998 - protein, 10 aa, Homo Sapiens
  sequence located in KRT14 at 93-102 and may interact with Sequence 997 in this patent.
AGLGGGFGGG

SEQ ID NO: 999 - protein, 10 aa, Homo Sapiens
  sequence located in ARRB1 OR ARR1 at 179-188 and may interact with Sequence 1000 in this patent.
PGPQPSAETT

SEQ ID NO: 1000 - protein, 10 aa, Homo Sapiens
  sequence located in KRT14 at 92-101 and may interact with Sequence 999 in this patent.
GAGLGGGFGG

SEQ ID NO: 1001 - protein, 10 aa, Homo Sapiens
  sequence located in ARRB1 OR ARR1 at 178-187 and may interact with Sequence 1002 in this patent.
KPGPQPSAET

SEQ ID NO: 1002 - protein, 10 aa, Homo Sapiens
  sequence located in KRT14 at 91-100 and may interact with Sequence 1001 in this patent.
LGAGLGGGFG

SEQ ID NO: 1003 - protein, 10 aa, Homo Sapiens
  sequence located in ARRB1 OR ARR1 at 181-190 and may interact with Sequence 1004 in this patent.
PQPSAETTPH

SEQ ID NO: 1004 - protein, 10 aa, Homo Sapiens
  sequence located in KRT16 at 94-103 and may interact with Sequence 1003 in this patent.
VGGGLGAGLG

SEQ ID NO: 1005 - protein, 10 aa, Homo Sapiens
  sequence located in ARRB1 OR ARR1 at 179-188 and may interact with Sequence 1006 in this patent.
PGPQPSAETT

SEQ ID NO: 1006 - protein, 10 aa, Homo Sapiens
  sequence located in KRT17 at 28-37 and may interact with Sequence 1005 in this patent.
CRLSGGLGAG

SEQ ID NO: 1007 - protein, 10 aa, Homo Sapiens
  sequence located in ARRB1 OR ARR1 at 178-187 and may interact with Sequence 1008 in this patent.
KPGPQPSAET

SEQ ID NO: 1008 - protein, 10 aa, Homo Sapiens
  sequence located in KRT17 at 90-99 and may interact with Sequence 1007 in this patent.
GFGGGLGAGF

SEQ ID NO: 1009 - protein, 10 aa, Homo Sapiens
  sequence located in ARRB1 OR ARR1 at 134-143 and may interact with Sequence 1010 in this patent.
PEDTGKACGV

SEQ ID NO: 1010 - protein, 10 aa, Homo Sapiens
  sequence located in NNT at 479-488 and may interact with Sequence 1009 in this patent.
YTAGLTGILG

SEQ ID NO: 1011 - protein, 10 aa, Homo Sapiens
  sequence located in ARRB1 OR ARR1 at 153-162 and may interact with Sequence 1012 in this patent.
KSLEEKSHKR

SEQ ID NO: 1012 - protein, 10 aa, Homo Sapiens
  sequence located in SLC11A2 OR NRAMP2 at 55-64 and may interact with Sequence 1011 in this patent.
TLVGLLLQRL

SEQ ID NO: 1013 - protein, 10 aa, Homo Sapiens
  sequence located in ARRB1 OR ARR1 at 178-187 and may interact with Sequence 1014 in this patent.
KPGPQPSAET

SEQ ID NO: 1014 - protein, 10 aa, Homo Sapiens
  sequence located in NUP62 at 412-421 and may interact with Sequence 1013 in this patent.
LGTGLGAGFG

SEQ ID NO: 1015 - protein, 10 aa, Homo Sapiens
  sequence located in ARRB1 OR ARR1 at 329-338 and may interact with Sequence 1016 in this patent.
VVSRGGDVSV

SEQ ID NO: 1016 - protein, 10 aa, Homo Sapiens
  sequence located in PYGL at 43-52 and may interact with Sequence 1015 in this patent.
DRNVATPRDY

SEQ ID NO: 1017 - protein, 10 aa, Homo Sapiens
  sequence located in ARRB1 OR ARR1 at 310-319 and may interact with Sequence 1018 in this patent.
GANKEVLGIL

SEQ ID NO: 1018 - protein, 10 aa, Homo Sapiens
  sequence located in PKD1 at 539-548 and may interact with Sequence 1017 in this patent.
QDAENLLVGA

SEQ ID NO: 1019 - protein, 10 aa, Homo Sapiens
  sequence located in ARRB1 OR ARR1 at 11-20 and may interact with Sequence 1020 in this patent.
KKSSPNCKLT

SEQ ID NO: 1020 - protein, 10 aa, Homo Sapiens
  sequence located in STAT2 at 338-347 and may interact with Sequence 1019 in this patent.
SKFTVRTRLL

SEQ ID NO: 1021 - protein, 10 aa, Homo Sapiens
  sequence located in ARRB1 OR ARR1 at 246-255 and may interact with Sequence 1022 in this patent.
STAQYKCPVA

SEQ ID NO: 1022 - protein, 10 aa, Homo Sapiens
  sequence located in STAT3 OR APRF at 371-380 and may interact with Sequence 1021 in this patent.
SNRRFVLCGT

SEQ ID NO: 1023 - protein, 10 aa, Homo Sapiens
  sequence located in ARRB1 OR ARR1 at 247-256 and may interact with Sequence 1024 in this patent.
TAQYKCPVAQ

SEQ ID NO: 1024 - protein, 10 aa, Homo Sapiens
  sequence located in STAT3 OR APRF at 370-379 and may interact with Sequence 1023 in this patent.
LSNRRFVLCG

SEQ ID NO: 1025 - protein, 10 aa, Homo Sapiens
  sequence located in ADRB1 OR ADRB1R OR B1AR at 276-285 and may interact with Sequence 1026 in this patent.
SPSPVPAPAP

SEQ ID NO: 1026 - protein, 10 aa, Homo Sapiens
  sequence located in Unknown at 701-710 and may interact with Sequence 1025 in this patent.
RGGGHRGRGG

SEQ ID NO: 1027 - protein, 10 aa, Homo Sapiens
  sequence located in ADRB1 OR ADRB1R OR B1AR at 270-279 and may interact with Sequence 1028 in this patent.
ARPPSPSPSP

SEQ ID NO: 1028 - protein, 10 aa, Homo Sapiens
  sequence located in RPS29 at 42-51 and may interact with Sequence 1027 in this patent.
RGRGRGRGAR

SEQ ID NO: 1029 - protein, 10 aa, Homo Sapiens
  sequence located in ADRB1 OR ADRB1R OR B1AR at 304-313 and may interact with Sequence 1030 in this patent.
GRAGKRRPSR

SEQ ID NO: 1030 - protein, 10 aa, Homo Sapiens
  sequence located in RYK at 3291-3300 and may interact with Sequence 1029 in this patent.
PPSALPAGAP

SEQ ID NO: 1031 - protein, 10 aa, Homo Sapiens
  sequence located in BAG1 at 9-18 and may interact with Sequence 1032 in this patent.
ALSAQLLQAR

SEQ ID NO: 1032 - protein, 10 aa, Homo Sapiens
  sequence located in XE169 OR SMCX at 787-796 and may interact with Sequence 1031 in this patent.
RKRSLEELRA

SEQ ID NO: 1033 - protein, 10 aa, Homo Sapiens
  sequence located in BMPR1B at 63-72 and may interact with Sequence 1034 in this patent.
GLPVVTSGCL

SEQ ID NO: 1034 - protein, 10 aa, Homo Sapiens
  sequence located in COL3A1 at 583-592 and may interact with Sequence 1033 in this patent.
PKGNDGAPGK

SEQ ID NO: 1035 - protein, 10 aa, Homo Sapiens
  sequence located in BMPR1B at 62-71 and may interact with Sequence 1036 in this patent.
SGLPVVTSGC

SEQ ID NO: 1036 - protein, 10 aa, Homo Sapiens
  sequence located in COL3A1 at 582-591 and may interact with Sequence 1035 in this patent.
GPKGNDGAPG

SEQ ID NO: 1037 - protein, 10 aa, Homo Sapiens
  sequence located in BMPR1B at 338-347 and may interact with Sequence 1038 in this patent.
ILVKKNGTCC

SEQ ID NO: 1038 - protein, 10 aa, Homo Sapiens
  sequence located in COL5A1 at 133-142 and may interact with Sequence 1037 in this patent.
GRSPVFLYED

SEQ ID NO: 1039 - protein, 10 aa, Homo Sapiens
  sequence located in BMPR1B at 453-462 and may interact with Sequence 1040 in this patent.
FPNRWSSDEC

SEQ ID NO: 1040 - protein, 10 aa, Homo Sapiens
  sequence located in CDH4 at 518-527 and may interact with Sequence 1039 in this patent.
EGVPPGTVLT

SEQ ID NO: 1041 - protein, 10 aa, Homo Sapiens
  sequence located in BMPR1B at 100-109 and may interact with Sequence 1042 in this patent.
NECNKDLHPT

SEQ ID NO: 1042 - protein, 10 aa, Homo Sapiens
  sequence located in CA12 at 169-178 and may interact with Sequence 1041 in this patent.
VLAVLIEMGS

SEQ ID NO: 1043 - protein, 10 aa, Homo Sapiens
  sequence located in BMPR1B at 99-108 and may interact with Sequence 1044 in this patent.
RNECNKDLHP

SEQ ID NO: 1044 - protein, 10 aa, Homo Sapiens
  sequence located in CA12 at 168-177 and may interact with Sequence 1043 in this patent.
AVLAVLIEMG

SEQ ID NO: 1045 - protein, 10 aa, Homo Sapiens
  sequence located in BMPR1B at 98-107 and may interact with Sequence 1046 in this patent.
ERNECNKDLH

SEQ ID NO: 1046 - protein, 10 aa, Homo Sapiens
  sequence located in CA12 at 167-176 and may interact with Sequence 1045 in this patent.
LAVLAVLIEM

SEQ ID NO: 1047 - protein, 10 aa, Homo Sapiens
  sequence located in BMPR1B at 97-106 and may interact with Sequence 1048 in this patent.
TERNECNKDL

SEQ ID NO: 1048 - protein, 10 aa, Homo Sapiens
  sequence located in CA12 at 166-175 and may interact with Sequence 1047 in this patent.
GLAVLAVLIE

SEQ ID NO: 1049 - protein, 10 aa, Homo Sapiens
  sequence located in BMPR1B at 227-236 and may interact with Sequence 1050 in this patent.
KVAVKVFFTT

SEQ ID NO: 1050 - protein, 10 aa, Homo Sapiens
  sequence located in CDK5 at 305-314 and may interact with Sequence 1049 in this patent.
RCKENLDSHL

SEQ ID NO: 1051 - protein, 10 aa, Homo Sapiens
  sequence located in BMPR1B at 184-193 and may interact with Sequence 1052 in this patent.
QSSGSGSGLP

SEQ ID NO: 1052 - protein, 10 aa, Homo Sapiens
  sequence located in GSN at 556-565 and may interact with Sequence 1051 in this patent.
GQTAPASTRL

SEQ ID NO: 1053 - protein, 10 aa, Homo Sapiens
  sequence located in BMPR1B at 305-314 and may interact with Sequence 1054 in this patent.
AYSSVSGLCH

SEQ ID NO: 1054 - protein, 10 aa, Homo Sapiens
  sequence located in SLC2A3 OR GLUT3 at 319-328 and may interact with Sequence 1053 in this patent.
VGQPAYATIG

SEQ ID NO: 1055 - protein, 10 aa, Homo Sapiens
  sequence located in BMPR1B at 69-78 and may interact with Sequence 1056 in this patent.
SGCLGLEGSD

SEQ ID NO: 1056 - protein, 10 aa, Homo Sapiens
  sequence located in HMBS OR PBGD at 24-33 and may interact with Sequence 1055 in this patent.
GTRKSQLARI

SEQ ID NO: 1057 - protein, 10 aa, Homo Sapiens
  sequence located in BMPR1B at 68-77 and may interact with Sequence 1058 in this patent.
TSGCLGLEGS

SEQ ID NO: 1058 - protein, 10 aa, Homo Sapiens
  sequence located in HOXD10 OR HOX4D at 183-192 and may interact with Sequence 1057 in this patent.
RGAAKPQLSA

SEQ ID NO: 1059 - protein, 10 aa, Homo Sapiens
  sequence located in BMPR1B at 181-190 and may interact with Sequence 1060 in this patent.
EQSQSSGSGS

SEQ ID NO: 1060 - protein, 10 aa, Homo Sapiens
  sequence located in ITPKB at 1964-1973 and may interact with Sequence 1059 in this patent.
GSTTGGLGLL

SEQ ID NO: 1061 - protein, 10 aa, Homo Sapiens
  sequence located in BMPR1B at 304-313 and may interact with Sequence 1062 in this patent.
LAYSSVSGLC

SEQ ID NO: 1062 - protein, 10 aa, Homo Sapiens
  sequence located in MAP17 at 157-166 and may interact with Sequence 1061 in this patent.
REPADAAIRE

SEQ ID NO: 1063 - protein, 10 aa, Homo Sapiens
  sequence located in BMPR1B at 13-22 and may interact with Sequence 1064 in this patent.
TKKEDGESTA

SEQ ID NO: 1064 - protein, 10 aa, Homo Sapiens
  sequence located in M6PR OR MPRD OR MPR46 at 2311-2320 and may interact with Sequence 1063 in this patent.
SLLLVALTCC

SEQ ID NO: 1065 - protein, 10 aa, Homo Sapiens
  sequence located in BMPR1B at 182-191 and may interact with Sequence 1066 in this patent.
QSQSSGSGSG

SEQ ID NO: 1066 - protein, 10 aa, Homo Sapiens
  sequence located in Unknown at 198-207 and may interact with Sequence 1065 in this patent.
LGLRTTTPGP

SEQ ID NO: 1067 - protein, 10 aa, Homo Sapiens
  sequence located in BMPR1B at 83-92 and may interact with Sequence 1068 in this patent.
DTPIPHQRRS

SEQ ID NO: 1068 - protein, 10 aa, Homo Sapiens
  sequence located in NRPN at 63-72 and may interact with Sequence 1067 in this patent.
VGGNWVLTAA

SEQ ID NO: 1069 - protein, 10 aa, Homo Sapiens
  sequence located in BMPR1B at 18-27 and may interact with Sequence 1070 in this patent.
GESTAPTPRP

SEQ ID NO: 1070 - protein, 10 aa, Homo Sapiens
  sequence located in PTGER1 at 237-246 and may interact with Sequence 1069 in this patent.
SLGSGRGGPG

SEQ ID NO: 1071 - protein, 10 aa, Homo Sapiens
  sequence located in BMPR1B at 216-225 and may interact with Sequence 1072 in this patent.
GEVWMGKWRG

SEQ ID NO: 1072 - protein, 10 aa, Homo Sapiens
  sequence located in PKD1 at 1145-1154 and may interact with Sequence 1071 in this patent.
TFYPHPLPSP

SEQ ID NO: 1073 - protein, 10 aa, Homo Sapiens
  sequence located in BMPR1B at 215-224 and may interact with Sequence 1074 in this patent.
YGEVWMGKWR

SEQ ID NO: 1074 - protein, 10 aa, Homo Sapiens
  sequence located in PKD1 at 1144-1153 and may interact with Sequence 1073 in this patent.
VTFYPHPLPS

SEQ ID NO: 1075 - protein, 10 aa, Homo Sapiens
  sequence located in BMPR1B at 214-223 and may interact with Sequence 1076 in this patent.
RYGEVWMGKW

SEQ ID NO: 1076 - protein, 10 aa, Homo Sapiens
  sequence located in PKD1 at 1143-1152 and may interact with Sequence 1075 in this patent.
PVTFYPHPLP

SEQ ID NO: 1077 - protein, 10 aa, Homo Sapiens
  sequence located in BMPR1B at 137-146 and may interact with Sequence 1078 in this patent.
LLLVLIILFC

SEQ ID NO: 1078 - protein, 10 aa, Homo Sapiens
  sequence located in Unknown at 14-23 and may interact with Sequence 1077 in this patent.
GKKDDEDKKK

SEQ ID NO: 1079 - protein, 10 aa, Homo Sapiens
  sequence located in BMPR1B at 353-362 and may interact with Sequence 1080 in this patent.
LAVKFISDTN

SEQ ID NO: 1080 - protein, 10 aa, Homo Sapiens
  sequence located in ADSS at 373-382 and may interact with Sequence 1079 in this patent.
VGVAYKLDGE

SEQ ID NO: 1081 - protein, 10 aa, Homo Sapiens
  sequence located in BMPR1B at 181-190 and may interact with Sequence 1082 in this patent.
EQSQSSGSGS

SEQ ID NO: 1082 - protein, 10 aa, Homo Sapiens
  sequence located in RCN2 OR ERC55 at 4-13 and may interact with Sequence 1081 in this patent.
GPRTAALGLL

SEQ ID NO: 1083 - protein, 10 aa, Homo Sapiens
  sequence located in BMPR1B at 181-190 and may interact with Sequence 1084 in this patent.
EQSQSSGSGS

SEQ ID NO: 1084 - protein, 10 aa, Homo Sapiens
  sequence located in RET at 5-14 and may interact with Sequence 1083 in this patent.
TSGAAGLRLL

SEQ ID NO: 1085 - protein, 10 aa, Homo Sapiens
  sequence located in BMPR1B at 182-191 and may interact with Sequence 1086 in this patent.
QSQSSGSGSG

SEQ ID NO: 1086 - protein, 10 aa, Homo Sapiens
  sequence located in RET at 4-13 and may interact with Sequence 1085 in this patent.
ATSGAAGLRL

SEQ ID NO: 1087 - protein, 10 aa, Homo Sapiens
  sequence located in BMPR1B at 183-192 and may interact with Sequence 1088 in this patent.
SQSSGSGSGL

SEQ ID NO: 1088 - protein, 10 aa, Homo Sapiens
  sequence located in RET at 3-12 and may interact with Sequence 1087 in this patent.
KATSGAAGLR

SEQ ID NO: 1089 - protein, 10 aa, Homo Sapiens
  sequence located in BMPR1B at 483-492 and may interact with Sequence 1090 in this patent.
TALRVKKTLA

SEQ ID NO: 1090 - protein, 10 aa, Homo Sapiens
  sequence located in RIN1 at 133-142 and may interact with Sequence 1089 in this patent.
CEGLLDPQCR

SEQ ID NO: 1091 - protein, 10 aa, Homo Sapiens
  sequence located in BMPR1B at 484-493 and may interact with Sequence 1092 in this patent.
ALRVKKTLAK

SEQ ID NO: 1092 - protein, 10 aa, Homo Sapiens
  sequence located in RIN1 at 132-141 and may interact with Sequence 1091 in this patent.
LCEGLLDPQC

SEQ ID NO: 1093 - protein, 10 aa, Homo Sapiens
  sequence located in BMPR1B at 478-487 and may interact with Sequence 1094 in this patent.
PASRLTALRV

SEQ ID NO: 1094 - protein, 10 aa, Homo Sapiens
  sequence located in HNRPM at 309-318 and may interact with Sequence 1093 in this patent.
RGAPEGGQPY

SEQ ID NO: 1095 - protein, 10 aa, Homo Sapiens
  sequence located in BMPR1B at 182-191 and may interact with Sequence 1096 in this patent.
QSQSSGSGSG

SEQ ID NO: 1096 - protein, 10 aa, Homo Sapiens
  sequence located in RYK at 4342-4351 and may interact with Sequence 1095 in this patent.
AGAAAGALGL

SEQ ID NO: 1097 - protein, 10 aa, Homo Sapiens
  sequence located in BMPR1B at 134-143 and may interact with Sequence 1098 in this patent.
VCSLLLVLII

SEQ ID NO: 1098 - protein, 10 aa, Homo Sapiens
  sequence located in TCEB1L OR SKP1 OR OCP2 at 73-82 and may interact with Sequence 1097 in this patent.
DDENKEKRTD

SEQ ID NO: 1099 - protein, 10 aa, Homo Sapiens
  sequence located in BMPR1B at 135-144 and may interact with Sequence 1100 in this patent.
CSLLLVLIIL

SEQ ID NO: 1100 - protein, 10 aa, Homo Sapiens
  sequence located in TCEB1L OR SKP1 OR OCP2 at 72-81 and may interact with Sequence 1099 in this patent.
EDDENKEKRT

SEQ ID NO: 1101 - protein, 10 aa, Homo Sapiens
  sequence located in BMPR1B at 18-27 and may interact with Sequence 1102 in this patent.
GESTAPTPRP

SEQ ID NO: 1102 - protein, 10 aa, Homo Sapiens
  sequence located in SRC OR SRC1 at 442-451 and may interact with Sequence 1101 in this patent.
SLGSRGSGSG

SEQ ID NO: 1103 - protein, 10 aa, Homo Sapiens
  sequence located in BMPR1B at 182-191 and may interact with Sequence 1104 in this patent.
QSQSSGSGSG

SEQ ID NO: 1104 - protein, 10 aa, Homo Sapiens
  sequence located in YARS at 136-145 and may interact with Sequence 1103 in this patent.
AAATAATLAL

SEQ ID NO: 1105 - protein, 10 aa, Homo Sapiens
  sequence located in BMPR1B at 182-191 and may interact with Sequence 1106 in this patent.
QSQSSGSGSG

SEQ ID NO: 1106 - protein, 10 aa, Homo Sapiens
  sequence located in TNFSF9 at 172-181 and may interact with Sequence 1105 in this patent.
SAAGAAALAL

SEQ ID NO: 1107 - protein, 10 aa, Homo Sapiens
  sequence located in BMPR1B at 18-27 and may interact with Sequence 1108 in this patent.
GESTAPTPRP

SEQ ID NO: 1108 - protein, 10 aa, Homo Sapiens
  sequence located in KIAA0144 at 183-192 and may interact with Sequence 1107 in this patent.
GSGRRGGRFS

SEQ ID NO: 1109 - protein, 10 aa, Homo Sapiens
  sequence located in BONZO OR STRL33 OR TYMSTR at 197-206 and may interact with Sequence 1110 in this patent.
TLGFFLPLLT

SEQ ID NO: 1110 - protein, 10 aa, Homo Sapiens
  sequence located in CHD1 at 164-173 and may interact with Sequence 1109 in this patent.
SESEEEREKS

SEQ ID NO: 1111 - protein, 10 aa, Homo Sapiens
  sequence located in BONZO OR STRL33 OR TYMSTR at 192-201 and may interact with Sequence 1112 in this patent.
LATQMTLGFF

SEQ ID NO: 1112 - protein, 10 aa, Homo Sapiens
  sequence located in MAGEA1 OR MAGE1 OR MAGE1A at 5-14 and may interact with Sequence 1111 in this patent.
QRSLHCKPEE

SEQ ID NO: 1113 - protein, 10 aa, Homo Sapiens
  sequence located in BTC at 99-108 and may interact with Sequence 1114 in this patent.
VTTESGSSPS

SEQ ID NO: 1114 - protein, 10 aa, Homo Sapiens
  sequence located in CREBBP OR CBP at 210-219 and may interact with Sequence 1113 in this patent.
NGSLGAAGRG

SEQ ID NO: 1115 - protein, 10 aa, Homo Sapiens
  sequence located in BTC at 21-30 and may interact with Sequence 1116 in this patent.
RAAVPEHGVA

SEQ ID NO: 1116 - protein, 10 aa, Homo Sapiens
  sequence located in EXTL3 OR EXTR1 at 3-12 and may interact with Sequence 1115 in this patent.
GYTMLRNGGA

SEQ ID NO: 1117 - protein, 10 aa, Homo Sapiens
  sequence located in BTC at 105-114 and may interact with Sequence 1118 in this patent.
SSPSHSPEER

SEQ ID NO: 1118 - protein, 10 aa, Homo Sapiens
  sequence located in FRDA OR X25 at 5-14 and may interact with Sequence 1117 in this patent.
GRRAVAGLLA

SEQ ID NO: 1119 - protein, 10 aa, Homo Sapiens
  sequence located in BTC at 119-128 and may interact with Sequence 1120 in this patent.
SAPSPLSLLH

SEQ ID NO: 1120 - protein, 10 aa, Homo Sapiens
  sequence located in GABRA3 at 365-374 and may interact with Sequence 1119 in this patent.
RSWAWEGKKV

SEQ ID NO: 1121 - protein, 10 aa, Homo Sapiens
  sequence located in BTC at 101-110 and may interact with Sequence 1122 in this patent.
TESGSSPSHS

SEQ ID NO: 1122 - protein, 10 aa, Homo Sapiens
  sequence located in PIK3R2 at 231-240 and may interact with Sequence 1121 in this patent.
RVARRAPALG

SEQ ID NO: 1123 - protein, 10 aa, Homo Sapiens
  sequence located in BTC at 102-111 and may interact with Sequence 1124 in this patent.
ESGSSPSHSP

SEQ ID NO: 1124 - protein, 10 aa, Homo Sapiens
  sequence located in PIK3R2 at 230-239 and may interact with Sequence 1123 in this patent.
GRVARRAPAL

SEQ ID NO: 1125 - protein, 10 aa, Homo Sapiens
  sequence located in BTC at 103-112 and may interact with Sequence 1126 in this patent.
SGSSPSHSPE

SEQ ID NO: 1126 - protein, 10 aa, Homo Sapiens
  sequence located in PIK3R2 at 229-238 and may interact with Sequence 1125 in this patent.
LGRVARRAPA

SEQ ID NO: 1127 - protein, 10 aa, Homo Sapiens
  sequence located in BTC at 104-113 and may interact with Sequence 1128 in this patent.
GSSPSHSPEE

SEQ ID NO: 1128 - protein, 10 aa, Homo Sapiens
  sequence located in PSMB5 OR LMPX at 45-54 and may interact with Sequence 1127 in this patent.
LLGTMAGGAA

SEQ ID NO: 1129 - protein, 10 aa, Homo Sapiens
  sequence located in BTC at 28-37 and may interact with Sequence 1130 in this patent.
GVAPDAERLR

SEQ ID NO: 1130 - protein, 10 aa, Homo Sapiens
  sequence located in ADSL at 310-319 and may interact with Sequence 1129 in this patent.
ANRRICLAEA

SEQ ID NO: 1131 - protein, 10 aa, Homo Sapiens
  sequence located in BTC at 113-122 and may interact with Sequence 1132 in this patent.
ERQDPGSAPS

SEQ ID NO: 1132 - protein, 10 aa, Homo Sapiens
  sequence located in CAD at 172-181 and may interact with Sequence 1131 in this patent.
TGGAPRILAL

SEQ ID NO: 1133 - protein, 10 aa, Homo Sapiens
  sequence located in BTN at 455-464 and may interact with Sequence 1134 in this patent.
PLRPFFCLWS

SEQ ID NO: 1134 - protein, 10 aa, Homo Sapiens
  sequence located in COL16A1 at 1179-1188 and may interact with Sequence 1133 in this patent.
GPQAEKGSEG

SEQ ID NO: 1135 - protein, 10 aa, Homo Sapiens
  sequence located in BTN at 203-212 and may interact with Sequence 1136 in this patent.
AASVIIRDTS

SEQ ID NO: 1136 - protein, 10 aa, Homo Sapiens
  sequence located in CTGF at 219-228 and may interact with Sequence 1135 in this patent.
TRVTNDNASC

SEQ ID NO: 1137 - protein, 10 aa, Homo Sapiens
  sequence located in BTN at 204-213 and may interact with Sequence 1138 in this patent.
ASVIIRDTST

SEQ ID NO: 1138 - protein, 10 aa, Homo Sapiens
  sequence located in CTGF at 218-227 and may interact with Sequence 1137 in this patent.
STRVTNDNAS

SEQ ID NO: 1139 - protein, 10 aa, Homo Sapiens
  sequence located in BTN at 217-226 and may interact with Sequence 1140 in this patent.
SCYIQNLLLG

SEQ ID NO: 1140 - protein, 10 aa, Homo Sapiens
  sequence located in DDX16 OR DBP2 at 310-319 and may interact with Sequence 1139 in this patent.
RAVDLVEEES

SEQ ID NO: 1141 - protein, 10 aa, Homo Sapiens
  sequence located in BTN at 4-13 and may interact with Sequence 1142 in this patent.
FPSSGLPRCL

SEQ ID NO: 1142 - protein, 10 aa, Homo Sapiens
  sequence located in H3F3B OR HISH3-3Q OR HIS3.3B at 5-14 and may interact with Sequence 1141 in this patent.
QTARKSTGGK

SEQ ID NO: 1143 - protein, 10 aa, Homo Sapiens
  sequence located in BTN at 5-14 and may interact with Sequence 1144 in this patent.
PSSGLPRCLL

SEQ ID NO: 1144 - protein, 10 aa, Homo Sapiens
  sequence located in H3F3B OR HISH3-3Q OR HIS3.3B at 4-13 and may interact with Sequence 1143 in this patent.
KQTARKSTGG

SEQ ID NO: 1145 - protein, 10 aa, Homo Sapiens
  sequence located in BTN at 53-62 and may interact with Sequence 1146 in this patent.
SPNASAEHLE

SEQ ID NO: 1146 - protein, 10 aa, Homo Sapiens
  sequence located in KPNA1 OR RCH2 at 295-304 and may interact with Sequence 1145 in this patent.
AGVCRRLVEL

SEQ ID NO: 1147 - protein, 10 aa, Homo Sapiens
  sequence located in BTN at 107-116 and may interact with Sequence 1148 in this patent.
VALRIRGVRV

SEQ ID NO: 1148 - protein, 10 aa, Homo Sapiens
  sequence located in DAGK3 OR DGKG at 97-106 and may interact with Sequence 1147 in this patent.
NSEANSADTN

SEQ ID NO: 1149 - protein, 10 aa, Homo Sapiens
  sequence located in BTN at 106-115 and may interact with Sequence 1150 in this patent.
RVALRIRGVR

SEQ ID NO: 1150 - protein, 10 aa, Homo Sapiens
  sequence located in DAGK3 OR DGKG at 96-105 and may interact with Sequence 1149 in this patent.
SNSEANSADT

SEQ ID NO: 1151 - protein, 10 aa, Homo Sapiens
  sequence located in BTN at 105-114 and may interact with Sequence 1152 in this patent.
GRVALRIRGV

SEQ ID NO: 1152 - protein, 10 aa, Homo Sapiens
  sequence located in DAGK3 OR DGKG at 95-104 and may interact with Sequence 1151 in this patent.
ASNSEANSAD

SEQ ID NO: 1153 - protein, 10 aa, Homo Sapiens
  sequence located in BTN at 177-186 and may interact with Sequence 1154 in this patent.
WRTSKGEKFP

SEQ ID NO: 1154 - protein, 10 aa, Homo Sapiens
  sequence located in Unknown at 860-869 and may interact with Sequence 1153 in this patent.
WELFSLGSSP

SEQ ID NO: 1155 - protein, 10 aa, Homo Sapiens
  sequence located in BTN at 367-376 and may interact with Sequence 1156 in this patent.
RTDWAIGVCR

SEQ ID NO: 1156 - protein, 10 aa, Homo Sapiens
  sequence located in PDNP1 OR PC1 OR NPPS at 326-335 and may interact with Sequence 1155 in this patent.
SGHSYGPVSS

SEQ ID NO: 1157 - protein, 10 aa, Homo Sapiens
  sequence located in BTN at 453-462 and may interact with Sequence 1158 in this patent.
SGPLRPFFCL

SEQ ID NO: 1158 - protein, 10 aa, Homo Sapiens
  sequence located in PDGFA at 195-204 and may interact with Sequence 1157 in this patent.
RPRESGKKRK

SEQ ID NO: 1159 - protein, 10 aa, Homo Sapiens
  sequence located in BTN at 332-341 and may interact with Sequence 1160 in this patent.
QKLPEKTERF

SEQ ID NO: 1160 - protein, 10 aa, Homo Sapiens
  sequence located in PLXN4 OR SEX at 1328-1337 and may interact with Sequence 1159 in this patent.
KALRLFGQLL

SEQ ID NO: 1161 - protein, 10 aa, Homo Sapiens
  sequence located in BTN at 406-415 and may interact with Sequence 1162 in this patent.
LTPLRTPLPL

SEQ ID NO: 1162 - protein, 10 aa, Homo Sapiens
  sequence located in RPS8 at 9-18 and may interact with Sequence 1161 in this patent.
KRRKTGGKRK

SEQ ID NO: 1163 - protein, 10 aa, Homo Sapiens
  sequence located in BTN at 87-96 and may interact with Sequence 1164 in this patent.
QMPEYRGRAT

SEQ ID NO: 1164 - protein, 10 aa, Homo Sapiens
  sequence located in SCNN1D OR DNACH at 139-148 and may interact with Sequence 1163 in this patent.
RRPSPVLRHL

SEQ ID NO: 1165 - protein, 10 aa, Homo Sapiens
  sequence located in BTN at 6-15 and may interact with Sequence 1166 in this patent.
SSGLPRCLLT

SEQ ID NO: 1166 - protein, 10 aa, Homo Sapiens
  sequence located in TFDP1 OR DP1 at 12-21 and may interact with Sequence 1165 in this patent.
RKKRPRQTGA

SEQ ID NO: 1167 - protein, 10 aa, Homo Sapiens
  sequence located in BTN at 312-321 and may interact with Sequence 1168 in this patent.
AHPHLFLYED

SEQ ID NO: 1168 - protein, 10 aa, Homo Sapiens
  sequence located in F8VWF OR VWF at 2533-2542 and may interact with Sequence 1167 in this patent.
CVRVKEEVFI

SEQ ID NO: 1169 - protein, 10 aa, Homo Sapiens
  sequence located in C3AR1 OR C3R1 OR AZ3B OR HNFAG09 at 10-19 and may interact with Sequence 1170 in this patent.
STDLLSQPWN

SEQ ID NO: 1170 - protein, 10 aa, Homo Sapiens
  sequence located in COL7A1 at 415-424 and may interact with Sequence 1169 in this patent.
ASVEQTLRPV

SEQ ID NO: 1171 - protein, 10 aa, Homo Sapiens
  sequence located in C3AR1 OR C3R1 OR AZ3B OR HNFAG09 at 242-251 and may interact with Sequence 1172 in this patent.
LPRGSARLTS

SEQ ID NO: 1172 - protein, 10 aa, Homo Sapiens
  sequence located in EDN2 at 133-142 and may interact with Sequence 1171 in this patent.
TGKTGATTGE

SEQ ID NO: 1173 - protein, 10 aa, Homo Sapiens
  sequence located in C3AR1 OR C3R1 OR AZ3B OR HNFAG09 at 242-251 and may interact with Sequence 1174 in this patent.
LPRGSARLTS

SEQ ID NO: 1174 - protein, 10 aa, Homo Sapiens
  sequence located in HD OR IT15 at 1205-1214 and may interact with Sequence 1173 in this patent.
GSEASAASRQ

SEQ ID NO: 1175 - protein, 10 aa, Homo Sapiens
  sequence located in C3AR1 OR C3R1 OR AZ3B OR HNFAG09 at 376-385 and may interact with Sequence 1176 in this patent.
FRVAVVVVAV

SEQ ID NO: 1176 - protein, 10 aa, Homo Sapiens
  sequence located in MLL OR HRX OR ALL1 OR TRX1 OR HTRX at 2830-2839 and may interact with Sequence 1175 in this patent.
KSDSDNNNSD

SEQ ID NO: 1177 - protein, 10 aa, Homo Sapiens
  sequence located in C3AR1 OR C3R1 OR AZ3B OR HNFAG09 at 232-241 and may interact with Sequence 1178 in this patent.
QTFQRPSADS

SEQ ID NO: 1178 - protein, 10 aa, Homo Sapiens
  sequence located in EIF2S1 OR EIF2A at 47-56 and may interact with Sequence 1177 in this patent.
LSELSRRRIR

SEQ ID NO: 1179 - protein, 10 aa, Homo Sapiens
  sequence located in C3AR1 OR C3R1 OR AZ3B OR HNFAG09 at 31-40 and may interact with Sequence 1180 in this patent.
SLTFLLGLPG

SEQ ID NO: 1180 - protein, 10 aa, Homo Sapiens
  sequence located in AKT2 at 2282-2291 and may interact with Sequence 1179 in this patent.
GQGEEKSEGP

SEQ ID NO: 1181 - protein, 10 aa, Homo Sapiens
  sequence located in C3AR1 OR C3R1 OR AZ3B OR HNFAG09 at 67-76 and may interact with Sequence 1182 in this patent.
ADLLCCLSLP

SEQ ID NO: 1182 - protein, 10 aa, Homo Sapiens
  sequence located in PCSK1 OR NEC1 at 291-300 and may interact with Sequence 1181 in this patent.
GVKQGRQGKG

SEQ ID NO: 1183 - protein, 10 aa, Homo Sapiens
  sequence located in C3AR1 OR C3R1 OR AZ3B OR HNFAG09 at 114-123 and may interact with Sequence 1184 in this patent.
TAISLDRCLV

SEQ ID NO: 1184 - protein, 10 aa, Homo Sapiens
  sequence located in RET at 336-345 and may interact with Sequence 1183 in this patent.
NETSVQANGS

SEQ ID NO: 1185 - protein, 10 aa, Homo Sapiens
  sequence located in C3AR1 OR C3R1 OR AZ3B OR HNFAG09 at 242-251 and may interact with Sequence 1186 in this patent.
LPRGSARLTS

SEQ ID NO: 1186 - protein, 10 aa, Homo Sapiens
  sequence located in TMPO at 231-240 and may interact with Sequence 1185 in this patent.
EWTSGSSKGG

SEQ ID NO: 1187 - protein, 10 aa, Homo Sapiens
  sequence located in C3AR1 OR C3R1 OR AZ3B OR HNFAG09 at 241-250 and may interact with Sequence 1188 in this patent.
SLPRGSARLT

SEQ ID NO: 1188 - protein, 10 aa, Homo Sapiens
  sequence located in TMPO at 230-239 and may interact with Sequence 1187 in this patent.
TEWTSGSSKG

SEQ ID NO: 1189 - protein, 10 aa, Homo Sapiens
  sequence located in C6.1A at 118-127 and may interact with Sequence 1190 in this patent.
SCGTYLRVRQ

SEQ ID NO: 1190 - protein, 10 aa, Homo Sapiens
  sequence located in Unknown at 549-558 and may interact with Sequence 1189 in this patent.
LSYSKIRTRG

SEQ ID NO: 1191 - protein, 10 aa, Homo Sapiens
  sequence located in C6.1A at 119-128 and may interact with Sequence 1192 in this patent.
CGTYLRVRQP

SEQ ID NO: 1192 - protein, 10 aa, Homo Sapiens
  sequence located in Unknown at 548-557 and may interact with Sequence 1191 in this patent.
GLSYSKIRTR

SEQ ID NO: 1193 - protein, 10 aa, Homo Sapiens
  sequence located in C6.1A at 119-128 and may interact with Sequence 1194 in this patent.
CGTYLRVRQP

SEQ ID NO: 1194 - protein, 10 aa, Homo Sapiens
  sequence located in HOXC4 OR HOX3E at 216-225 and may interact with Sequence 1193 in this patent.
RLPNTKVRSA

SEQ ID NO: 1195 - protein, 10 aa, Homo Sapiens
  sequence located in C6.1A at 161-170 and may interact with Sequence 1196 in this patent.
TLLLFRKRWQ

SEQ ID NO: 1196 - protein, 10 aa, Homo Sapiens
  sequence located in LCT OR LPH at 1186-1195 and may interact with Sequence 1195 in this patent.
LPSFTEEEKR

SEQ ID NO: 1197 - protein, 10 aa, Homo Sapiens
  sequence located in C6.1A at 12-21 and may interact with Sequence 1198 in this patent.
PATIFLLFLL

SEQ ID NO: 1198 - protein, 10 aa, Homo Sapiens
  sequence located in SMARCA2 OR SNF2L2 OR BRM OR SNF2A at 1632-1641 and may interact with Sequence 1197 in this patent.
EEEQEEDRSG

SEQ ID NO: 1199 - protein, 10 aa, Homo Sapiens
  sequence located in CACNA1S OR CACNL1A3 OR CACH1 OR CACN1 at 904-913 and may interact with Sequence 1200 in this patent.
PLRAINRAKG

SEQ ID NO: 1200 - protein, 10 aa, Homo Sapiens
  sequence located in CACNA1S OR CACNL1A3 OR CACH1 OR CACN1 at 904-913 and may interact with Sequence 1199 in this patent.
PLRAINRAKG

SEQ ID NO: 1201 - protein, 10 aa, Homo Sapiens
  sequence located in CACNA1S OR CACNL1A3 OR CACH1 OR CACN1 at 246-255 and may interact with Sequence 1202 in this patent.
ARTGSGRRCT

SEQ ID NO: 1202 - protein, 10 aa, Homo Sapiens
  sequence located in CDSN at 77-86 and may interact with Sequence 1201 in this patent.
GPGPAAPAAS

SEQ ID NO: 1203 - protein, 10 aa, Homo Sapiens
  sequence located in CACNA1S OR CACNL1A3 OR CACH1 OR CACN1 at 1778-1787 and may interact with Sequence 1204 in this patent.
RCSAPATALL

SEQ ID NO: 1204 - protein, 10 aa, Homo Sapiens
  sequence located in CENPE at 3134-3143 and may interact with Sequence 1203 in this patent.
PTAGGSRSQK

SEQ ID NO: 1205 - protein, 10 aa, Homo Sapiens
  sequence located in CACNA1S OR CACNL1A3 OR CACH1 OR CACN1 at 246-255 and may interact with Sequence 1206 in this patent.
ARTGSGRRCT

SEQ ID NO: 1206 - protein, 10 aa, Homo Sapiens
  sequence located in CHD1 at 24-33 and may interact with Sequence 1205 in this patent.
SGSASGSGSG

SEQ ID NO: 1207 - protein, 10 aa, Homo Sapiens
  sequence located in CACNA1S OR CACNL1A3 OR CACH1 OR CACN1 at 247-256 and may interact with Sequence 1208 in this patent.
RTGSGRRCTI

SEQ ID NO: 1208 - protein, 10 aa, Homo Sapiens
  sequence located in CHD1 at 23-32 and may interact with Sequence 1207 in this patent.
DSGSASGSGS

SEQ ID NO: 1209 - protein, 10 aa, Homo Sapiens
  sequence located in CACNA1S OR CACNL1A3 OR CACH1 OR CACN1 at 246-255 and may interact with Sequence 1210 in this patent.
ARTGSGRRCT

SEQ ID NO: 1210 - protein, 10 aa, Homo Sapiens
  sequence located in CHD1 at 29-38 and may interact with Sequence 1209 in this patent.
GSGSGSSSGS

SEQ ID NO: 1211 - protein, 10 aa, Homo Sapiens
  sequence located in CACNA1S OR CACNL1A3 OR CACH1 OR CACN1 at 9-18 and may interact with Sequence 1212 in this patent.
EGLRKKQPKK

SEQ ID NO: 1212 - protein, 10 aa, Homo Sapiens
  sequence located in SCN4A at 835-844 and may interact with Sequence 1211 in this patent.
FAKAFLLGLL

SEQ ID NO: 1213 - protein, 10 aa, Homo Sapiens
  sequence located in CACNA1S OR CACNL1A3 OR CACH1 OR CACN1 at 1600-1609 and may interact with Sequence 1214 in this patent.
RTGGLFGQVD

SEQ ID NO: 1214 - protein, 10 aa, Homo Sapiens
  sequence located in C6 at 902-911 and may interact with Sequence 1213 in this patent.
SSTSEKTLNI

SEQ ID NO: 1215 - protein, 10 aa, Homo Sapiens
  sequence located in CACNA1S OR CACNL1A3 OR CACH1 OR CACN1 at 1560-1569 and may interact with Sequence 1216 in this patent.
RTIEEEAAPE

SEQ ID NO: 1216 - protein, 10 aa, Homo Sapiens
  sequence located in CYP21B OR CYP21 OR CYP21A2 at 379-388 and may interact with Sequence 1215 in this patent.
PGYLFLGSRL

SEQ ID NO: 1217 - protein, 10 aa, Homo Sapiens
  sequence located in CACNA1S OR CACNL1A3 OR CACH1 OR CACN1 at 1559-1568 and may interact with Sequence 1218 in this patent.
LRTIEEEAAP

SEQ ID NO: 1218 - protein, 10 aa, Homo Sapiens
  sequence located in CYP21B OR CYP21 OR CYP21A2 at 378-387 and may interact with Sequence 1217 in this patent.
EPGYLFLGSR

SEQ ID NO: 1219 - protein, 10 aa, Homo Sapiens
  sequence located in CACNA1S OR CACNL1A3 OR CACH1 OR CACN1 at 246-255 and may interact with Sequence 1220 in this patent.
ARTGSGRRCT

SEQ ID NO: 1220 - protein, 10 aa, Homo Sapiens
  sequence located in CRYBB1 at 24-33 and may interact with Sequence 1219 in this patent.
GAPPAGTSPS

SEQ ID NO: 1221 - protein, 10 aa, Homo Sapiens
  sequence located in CACNA1S OR CACNL1A3 OR CACH1 OR CACN1 at 243-252 and may interact with Sequence 1222 in this patent.
SPCARTGSGR

SEQ ID NO: 1222 - protein, 10 aa, Homo Sapiens
  sequence located in CRYBB1 at 28-37 and may interact with Sequence 1221 in this patent.
AGTSPSPGTT

SEQ ID NO: 1223 - protein, 10 aa, Homo Sapiens
  sequence located in CACNA1S OR CACNL1A3 OR CACH1 OR CACN1 at 245-254 and may interact with Sequence 1224 in this patent.
CARTGSGRRC

SEQ ID NO: 1224 - protein, 10 aa, Homo Sapiens
  sequence located in CTRL OR CTRL1 at 1113-1122 and may interact with Sequence 1223 in this patent.
ARSSAGTPAR

SEQ ID NO: 1225 - protein, 10 aa, Homo Sapiens
  sequence located in CACNA1S OR CACNL1A3 OR CACH1 OR CACN1 at 245-254 and may interact with Sequence 1226 in this patent.
CARTGSGRRC

SEQ ID NO: 1226 - protein, 10 aa, Homo Sapiens
  sequence located in GJA1 at 361-370 and may interact with Sequence 1225 in this patent.
RPSSRASSRA

SEQ ID NO: 1227 - protein, 10 aa, Homo Sapiens
  sequence located in CACNA1S OR CACNL1A3 OR CACH1 OR CACN1 at 246-255 and may interact with Sequence 1228 in this patent.
ARTGSGRRCT

SEQ ID NO: 1228 - protein, 10 aa, Homo Sapiens
  sequence located in GJA1 at 364-373 and may interact with Sequence 1227 in this patent.
SRASSRASSR

SEQ ID NO: 1229 - protein, 10 aa, Homo Sapiens
  sequence located in CACNA1S OR CACNL1A3 OR CACH1 OR CACN1 at 664-673 and may interact with Sequence 1230 in this patent.
LAEAESLTSA

SEQ ID NO: 1230 - protein, 10 aa, Homo Sapiens
  sequence located in CSF2RB OR IL5RB OR IL3RB at 177-186 and may interact with Sequence 1229 in this patent.
KGFGFGQGAG

SEQ ID NO: 1231 - protein, 10 aa, Homo Sapiens
  sequence located in CACNA1S OR CACNL1A3 OR CACH1 OR CACN1 at 245-254 and may interact with Sequence 1232 in this patent.
CARTGSGRRC

SEQ ID NO: 1232 - protein, 10 aa, Homo Sapiens
  sequence located in Unknown at 17-26 and may interact with Sequence 1231 in this patent.
GPAAGASAGA

SEQ ID NO: 1233 - protein, 10 aa, Homo Sapiens
  sequence located in CACNA1S OR CACNL1A3 OR CACH1 OR CACN1 at 246-255 and may interact with Sequence 1234 in this patent.
ARTGSGRRCT

SEQ ID NO: 1234 - protein, 10 aa, Homo Sapiens
  sequence located in Unknown at 16-25 and may interact with Sequence 1233 in this patent.
RGPAAGASAG

SEQ ID NO: 1235 - protein, 10 aa, Homo Sapiens
  sequence located in CACNA1S OR CACNL1A3 OR CACH1 OR CACN1 at 245-254 and may interact with Sequence 1236 in this patent.
CARTGSGRRC

SEQ ID NO: 1236 - protein, 10 aa, Homo Sapiens
  sequence located in Unknown at 20-29 and may interact with Sequence 1235 in this patent.
AGASAGASAG

SEQ ID NO: 1237 - protein, 10 aa, Homo Sapiens
  sequence located in CACNA1S OR CACNL1A3 OR CACH1 OR CACN1 at 1247-1256 and may interact with Sequence 1238 in this patent.
LSRAEGVRTL

SEQ ID NO: 1238 - protein, 10 aa, Homo Sapiens
  sequence located in DCTD at 603-612 and may interact with Sequence 1237 in this patent.
QAPSLPNTSE

SEQ ID NO: 1239 - protein, 10 aa, Homo Sapiens
  sequence located in CACNA1S OR CACNL1A3 OR CACH1 OR CACN1 at 245-254 and may interact with Sequence 1240 in this patent.
CARTGSGRRC

SEQ ID NO: 1240 - protein, 10 aa, Homo Sapiens
  sequence located in DOC2 at 9-18 and may interact with Sequence 1239 in this patent.
APSSTPGSST

SEQ ID NO: 1241 - protein, 10 aa, Homo Sapiens
  sequence located in CACNA1S OR CACNL1A3 OR CACH1 OR CACN1 at 546-555 and may interact with Sequence 1242 in this patent.
SNLVASLLNS

SEQ ID NO: 1242 - protein, 10 aa, Homo Sapiens
  sequence located in POLE2 OR DPE2 at 404-413 and may interact with Sequence 1241 in this patent.
RIQYCTQEIT

SEQ ID NO: 1243 - protein, 10 aa, Homo Sapiens
  sequence located in CACNA1S OR CACNL1A3 OR CACH1 OR CACN1 at 246-255 and may interact with Sequence 1244 in this patent.
ARTGSGRRCT

SEQ ID NO: 1244 - protein, 10 aa, Homo Sapiens
  sequence located in DSG1 at 1029-1038 and may interact with Sequence 1243 in this patent.
SASPSTARSR

SEQ ID NO: 1245 - protein, 10 aa, Homo Sapiens
  sequence located in CACNA1S OR CACNL1A3 OR CACH1 OR CACN1 at 1216-1225 and may interact with Sequence 1246 in this patent.
GGGCGNVDPD

SEQ ID NO: 1246 - protein, 10 aa, Homo Sapiens
  sequence located in DSG3 at 476-485 and may interact with Sequence 1245 in this patent.
TSTGTVYVRV

SEQ ID NO: 1247 - protein, 10 aa, Homo Sapiens
  sequence located in CACNA1S OR CACNL1A3 OR CACH1 OR CACN1 at 1215-1224 and may interact with Sequence 1248 in this patent.
LGGGCGNVDP

SEQ ID NO: 1248 - protein, 10 aa, Homo Sapiens
  sequence located in DSG3 at 475-484 and may interact with Sequence 1247 in this patent.
KTSTGTVYVR

SEQ ID NO: 1249 - protein, 10 aa, Homo Sapiens
  sequence located in CACNA1S OR CACNL1A3 OR CACH1 OR CACN1 at 1214-1223 and may interact with Sequence 1250 in this patent.
CLGGGCGNVD

SEQ ID NO: 1250 - protein, 10 aa, Homo Sapiens
  sequence located in DSG3 at 474-483 and may interact with Sequence 1249 in this patent.
GKTSTGTVYV

SEQ ID NO: 1251 - protein, 10 aa, Homo Sapiens
  sequence located in CACNA1S OR CACNL1A3 OR CACH1 OR CACN1 at 1776-1785 and may interact with Sequence 1252 in this patent.
TSRCSAPATA

SEQ ID NO: 1252 - protein, 10 aa, Homo Sapiens
  sequence located in EFNB1 OR EPLG2 OR LERK2 OR EFL-3 at 218-227 and may interact with Sequence 1251 in this patent.
SGPGASGGSS

SEQ ID NO: 1253 - protein, 10 aa, Homo Sapiens
  sequence located in CACNA1S OR CACNL1A3 OR CACH1 OR CACN1 at 1772-1781 and may interact with Sequence 1254 in this patent.
TRENTSRCSA

SEQ ID NO: 1254 - protein, 10 aa, Homo Sapiens
  sequence located in ELA2 at 267-276 and may interact with Sequence 1253 in this patent.
GAGAAGVLPG

SEQ ID NO: 1255 - protein, 10 aa, Homo Sapiens
  sequence located in CACNA1S OR CACNL1A3 OR CACH1 OR CACN1 at 260-269 and may interact with Sequence 1256 in this patent.
ECRGGWPGPN

SEQ ID NO: 1256 - protein, 10 aa, Homo Sapiens
  sequence located in ELA2 at 4-13 and may interact with Sequence 1255 in this patent.
LTAAAPRPGV

SEQ ID NO: 1257 - protein, 10 aa, Homo Sapiens
  sequence located in CACNA1S OR CACNL1A3 OR CACH1 OR CACN1 at 259-268 and may interact with Sequence 1258 in this patent.
SECRGGWPGP

SEQ ID NO: 1258 - protein, 10 aa, Homo Sapiens
  sequence located in ELA2 at 3-12 and may interact with Sequence 1257 in this patent.
GLTAAAPRPG

SEQ ID NO: 1259 - protein, 10 aa, Homo Sapiens
  sequence located in CACNA1S OR CACNL1A3 OR CACH1 OR CACN1 at 258-267 and may interact with Sequence 1260 in this patent.
GSECRGGWPG

SEQ ID NO: 1260 - protein, 10 aa, Homo Sapiens
  sequence located in ELA2 at 2-11 and may interact with Sequence 1259 in this patent.
AGLTAAAPRP

SEQ ID NO: 1261 - protein, 10 aa, Homo Sapiens
  sequence located in CACNA1S OR CACNL1A3 OR CACH1 OR CACN1 at 1771-1780 and may interact with Sequence 1262 in this patent.
STRENTSRCS

SEQ ID NO: 1262 - protein, 10 aa, Homo Sapiens
  sequence located in ERP60 at 122-131 and may interact with Sequence 1261 in this patent.
ATSASVLASR

SEQ ID NO: 1263 - protein, 10 aa, Homo Sapiens
  sequence located in CACNA1S OR CACNL1A3 OR CACH1 OR CACN1 at 257-266 and may interact with Sequence 1264 in this patent.
NGSECRGGWP

SEQ ID NO: 1264 - protein, 10 aa, Homo Sapiens
  sequence located in ERK5 OR ERK4 at 576-585 and may interact with Sequence 1263 in this patent.
RPAAPALTSV

SEQ ID NO: 1265 - protein, 10 aa, Homo Sapiens
  sequence located in CACNA1S OR CACNL1A3 OR CACH1 OR CACN1 at 258-267 and may interact with Sequence 1266 in this patent.
GSECRGGWPG

SEQ ID NO: 1266 - protein, 10 aa, Homo Sapiens
  sequence located in ERK5 OR ERK4 at 575-584 and may interact with Sequence 1265 in this patent.
ARPAAPALTS

SEQ ID NO: 1267 - protein, 10 aa, Homo Sapiens
  sequence located in CACNA1S OR CACNL1A3 OR CACH1 OR CACN1 at 266-275 and may interact with Sequence 1268 in this patent.
PGPNHGITHF

SEQ ID NO: 1268 - protein, 10 aa, Homo Sapiens
  sequence located in ETFB at 26-35 and may interact with Sequence 1267 in this patent.
RTGVVTDGVK

SEQ ID NO: 1269 - protein, 10 aa, Homo Sapiens
  sequence located in CACNA1S OR CACNL1A3 OR CACH1 OR CACN1 at 246-255 and may interact with Sequence 1270 in this patent.
ARTGSGRRCT

SEQ ID NO: 1270 - protein, 10 aa, Homo Sapiens
  sequence located in EVX2 at 9-18 and may interact with Sequence 1269 in this patent.
GTTTSASGSG

SEQ ID NO: 1271 - protein, 10 aa, Homo Sapiens
  sequence located in CACNA1S OR CACNL1A3 OR CACH1 OR CACN1 at 1776-1785 and may interact with Sequence 1272 in this patent.
TSRCSAPATA

SEQ ID NO: 1272 - protein, 10 aa, Homo Sapiens
  sequence located in EWSR1 OR EWS at 611-620 and may interact with Sequence 1271 in this patent.
GGGRRGGPGG

SEQ ID NO: 1273 - protein, 10 aa, Homo Sapiens
  sequence located in CACNA1S OR CACNL1A3 OR CACH1 OR CACN1 at 246-255 and may interact with Sequence 1274 in this patent.
ARTGSGRRCT

SEQ ID NO: 1274 - protein, 10 aa, Homo Sapiens
  sequence located in EZF at 130-139 and may interact with Sequence 1273 in this patent.
SGPASAPSTC

SEQ ID NO: 1275 - protein, 10 aa, Homo Sapiens
  sequence located in CACNA1S OR CACNL1A3 OR CACH1 OR CACN1 at 564-573 and may interact with Sequence 1276 in this patent.
LLLFLFIVIF

SEQ ID NO: 1276 - protein, 10 aa, Homo Sapiens
  sequence located in EZH1 at 391-400 and may interact with Sequence 1275 in this patent.
ENNDKEEEEK

SEQ ID NO: 1277 - protein, 10 aa, Homo Sapiens
  sequence located in CACNA1S OR CACNL1A3 OR CACH1 OR CACN1 at 565-574 and may interact with Sequence 1278 in this patent.
LLFLFIVIFA

SEQ ID NO: 1278 - protein, 10 aa, Homo Sapiens
  sequence located in EZH1 at 390-399 and may interact with Sequence 1277 in this patent.
GENNDKEEEE

SEQ ID NO: 1279 - protein, 10 aa, Homo Sapiens
  sequence located in CACNA1S OR CACNL1A3 OR CACH1 OR CACN1 at 242-251 and may interact with Sequence 1280 in this patent.
PSPCARTGSG

SEQ ID NO: 1280 - protein, 10 aa, Homo Sapiens
  sequence located in FKHL8 OR FREAC4 at 94-103 and may interact with Sequence 1279 in this patent.
PAAGAGAGGG

SEQ ID NO: 1281 - protein, 10 aa, Homo Sapiens
  sequence located in CACNA1S OR CACNL1A3 OR CACH1 OR CACN1 at 243-252 and may interact with Sequence 1282 in this patent.
SPCARTGSGR

SEQ ID NO: 1282 - protein, 10 aa, Homo Sapiens
  sequence located in FKHL8 OR FREAC4 at 400-409 and may interact with Sequence 1281 in this patent.
PPAPGSSGGG

SEQ ID NO: 1283 - protein, 10 aa, Homo Sapiens
  sequence located in CACNA1S OR CACNL1A3 OR CACH1 OR CACN1 at 243-252 and may interact with Sequence 1284 in this patent.
SPCARTGSGR

SEQ ID NO: 1284 - protein, 10 aa, Homo Sapiens
  sequence located in FKHL8 OR FREAC4 at 93-102 and may interact with Sequence 1283 in this patent.
APAAGAGAGG

SEQ ID NO: 1285 - protein, 10 aa, Homo Sapiens
  sequence located in CACNA1S OR CACNL1A3 OR CACH1 OR CACN1 at 244-253 and may interact with Sequence 1286 in this patent.
PCARTGSGRR

SEQ ID NO: 1286 - protein, 10 aa, Homo Sapiens
  sequence located in FKHL8 OR FREAC4 at 399-408 and may interact with Sequence 1285 in this patent.
APPAPGSSGG

SEQ ID NO: 1287 - protein, 10 aa, Homo Sapiens
  sequence located in CACNA1S OR CACNL1A3 OR CACH1 OR CACN1 at 244-253 and may interact with Sequence 1288 in this patent.
PCARTGSGRR

SEQ ID NO: 1288 - protein, 10 aa, Homo Sapiens
  sequence located in FKHL8 OR FREAC4 at 94-103 and may interact with Sequence 1287 in this patent.
PAAGAGAGGG

SEQ ID NO: 1289 - protein, 10 aa, Homo Sapiens
  sequence located in CACNA1S OR CACNL1A3 OR CACH1 OR CACN1 at 244-253 and may interact with Sequence 1290 in this patent.
PCARTGSGRR

SEQ ID NO: 1290 - protein, 10 aa, Homo Sapiens
  sequence located in FKHL8 OR FREAC4 at 92-101 and may interact with Sequence 1289 in this patent.
PAPAAGAGAG

SEQ ID NO: 1291 - protein, 10 aa, Homo Sapiens
  sequence located in CACNA1S OR CACNL1A3 OR CACH1 OR CACN1 at 245-254 and may interact with Sequence 1292 in this patent.
CARTGSGRRC

SEQ ID NO: 1292 - protein, 10 aa, Homo Sapiens
  sequence located in FKHL8 OR FREAC4 at 398-407 and may interact with Sequence 1291 in this patent.
AAPPAPGSSG

SEQ ID NO: 1293 - protein, 10 aa, Homo Sapiens
  sequence located in CACNA1S OR CACNL1A3 OR CACH1 OR CACN1 at 245-254 and may interact with Sequence 1294 in this patent.
CARTGSGRRC

SEQ ID NO: 1294 - protein, 10 aa, Homo Sapiens
  sequence located in FKHL8 OR FREAC4 at 93-102 and may interact with Sequence 1293 in this patent.
APAAGAGAGG

SEQ ID NO: 1295 - protein, 10 aa, Homo Sapiens
  sequence located in CACNA1S OR CACNL1A3 OR CACH1 OR CACN1 at 245-254 and may interact with Sequence 1296 in this patent.
CARTGSGRRC

SEQ ID NO: 1296 - protein, 10 aa, Homo Sapiens
  sequence located in FKHL8 OR FREAC4 at 91-100 and may interact with Sequence 1295 in this patent.
GPAPAAGAGA

SEQ ID NO: 1297 - protein, 10 aa, Homo Sapiens
  sequence located in CACNA1S OR CACNL1A3 OR CACH1 OR CACN1 at 338-347 and may interact with Sequence 1298 in this patent.
TKEREKAKSR

SEQ ID NO: 1298 - protein, 10 aa, Homo Sapiens
  sequence located in FSHB at 7-16 and may interact with Sequence 1297 in this patent.
SLLAFLSLGS

SEQ ID NO: 1299 - protein, 10 aa, Homo Sapiens
  sequence located in CACNA1S OR CACNL1A3 OR CACH1 OR CACN1 at 1776-1785 and may interact with Sequence 1300 in this patent.
TSRCSAPATA

SEQ ID NO: 1300 - protein, 10 aa, Homo Sapiens
  sequence located in FXR1 at 431-440 and may interact with Sequence 1299 in this patent.
GRGRGRRTGG

SEQ ID NO: 1301 - protein, 10 aa, Homo Sapiens
  sequence located in CACNA1S OR CACNL1A3 OR CACH1 OR CACN1 at 1776-1785 and may interact with Sequence 1302 in this patent.
TSRCSAPATA

SEQ ID NO: 1302 - protein, 10 aa, Homo Sapiens
  sequence located in FXR1 at 482-491 and may interact with Sequence 1301 in this patent.
RRPTGGRGRG

SEQ ID NO: 1303 - protein, 10 aa, Homo Sapiens
  sequence located in CACNA1S OR CACNL1A3 OR CACH1 OR CACN1 at 1776-1785 and may interact with Sequence 1304 in this patent.
TSRCSAPATA

SEQ ID NO: 1304 - protein, 10 aa, Homo Sapiens
  sequence located in GAS1 at 298-307 and may interact with Sequence 1303 in this patent.
SGAAASGGRG

SEQ ID NO: 1305 - protein, 10 aa, Homo Sapiens
  sequence located in CACNA1S OR CACNL1A3 OR CACH1 OR CACN1 at 242-251 and may interact with Sequence 1306 in this patent.
PSPCARTGSG

SEQ ID NO: 1306 - protein, 10 aa, Homo Sapiens
  sequence located in GCS1 at 32-41 and may interact with Sequence 1305 in this patent.
GRGGGPRSTA

SEQ ID NO: 1307 - protein, 10 aa, Homo Sapiens
  sequence located in CACNA1S OR CACNL1A3 OR CACH1 OR CACN1 at 1769-1778 and may interact with Sequence 1308 in this patent.
SRSTRENTSR

SEQ ID NO: 1308 - protein, 10 aa, Homo Sapiens
  sequence located in ARHGDIG at 186-195 and may interact with Sequence 1307 in this patent.
APRGALVRGP

SEQ ID NO: 1309 - protein, 10 aa, Homo Sapiens
  sequence located in CACNA1S OR CACNL1A3 OR CACH1 OR CACN1 at 245-254 and may interact with Sequence 1310 in this patent.
CARTGSGRRC

SEQ ID NO: 1310 - protein, 10 aa, Homo Sapiens
  sequence located in GOLGA2 at 399-408 and may interact with Sequence 1309 in this patent.
AAAPAPGTGG

SEQ ID NO: 1311 - protein, 10 aa, Homo Sapiens
  sequence located in CACNA1S OR CACNL1A3 OR CACH1 OR CACN1 at 1347-1356 and may interact with Sequence 1312 in this patent.
GEEYTCGTNF

SEQ ID NO: 1312 - protein, 10 aa, Homo Sapiens
  sequence located in GIP at 351-360 and may interact with Sequence 1311 in this patent.
PLLVRGPGIK

SEQ ID NO: 1313 - protein, 10 aa, Homo Sapiens
  sequence located in CACNA1S OR CACNL1A3 OR CACH1 OR CACN1 at 1776-1785 and may interact with Sequence 1314 in this patent.
TSRCSAPATA

SEQ ID NO: 1314 - protein, 10 aa, Homo Sapiens
  sequence located in GRB14 at 20-29 and may interact with Sequence 1313 in this patent.
SSCRRTGAAC

SEQ ID NO: 1315 - protein, 10 aa, Homo Sapiens
  sequence located in CACNA1S OR CACNL1A3 OR CACH1 OR CACN1 at 210-219 and may interact with Sequence 1316 in this patent.
YAIIGLELFK

SEQ ID NO: 1316 - protein, 10 aa, Homo Sapiens
  sequence located in GSTM1 OR GST1 at 113-122 and may interact with Sequence 1315 in this patent.
ICYNPEFEKL

SEQ ID NO: 1317 - protein, 10 aa, Homo Sapiens
  sequence located in CACNA1S OR CACNL1A3 OR CACH1 OR CACN1 at 1755-1764 and may interact with Sequence 1318 in this patent.
KSSTPGSLHE

SEQ ID NO: 1318 - protein, 10 aa, Homo Sapiens
  sequence located in SLC2A3 OR GLUT3 at 343-352 and may interact with Sequence 1317 in this patent.
LVERAGRRTL

SEQ ID NO: 1319 - protein, 10 aa, Homo Sapiens
  sequence located in CACNA1S OR CACNL1A3 OR CACH1 OR CACN1 at 1756-1765 and may interact with Sequence 1320 in this patent.
SSTPGSLHEE

SEQ ID NO: 1320 - protein, 10 aa, Homo Sapiens
  sequence located in SLC2A3 OR GLUT3 at 342-351 and may interact with Sequence 1319 in this patent.
LLVERAGRRT

SEQ ID NO: 1321 - protein, 10 aa, Homo Sapiens
  sequence located in CACNA1S OR CACNL1A3 OR CACH1 OR CACN1 at 1793-1802 and may interact with Sequence 1322 in this patent.
VRGGLGTLAA

SEQ ID NO: 1322 - protein, 10 aa, Homo Sapiens
  sequence located in Unknown at 150-159 and may interact with Sequence 1321 in this patent.
RSESPQPAPD

SEQ ID NO: 1323 - protein, 10 aa, Homo Sapiens
  sequence located in CACNA1S OR CACNL1A3 OR CACH1 OR CACN1 at 460-469 and may interact with Sequence 1324 in this patent.
LTRLQDIANR

SEQ ID NO: 1324 - protein, 10 aa, Homo Sapiens
  sequence located in HD OR IT15 at 2120-2129 and may interact with Sequence 1323 in this patent.
EGAELVNRIP

SEQ ID NO: 1325 - protein, 10 aa, Homo Sapiens
  sequence located in CACNA1S OR CACNL1A3 OR CACH1 OR CACN1 at 1791-1800 and may interact with Sequence 1326 in this patent.
ALVRGGLGTL

SEQ ID NO: 1326 - protein, 10 aa, Homo Sapiens
  sequence located in HTN3 OR HIS2 at 102-111 and may interact with Sequence 1325 in this patent.
KSPEPSADES

SEQ ID NO: 1327 - protein, 10 aa, Homo Sapiens
  sequence located in CACNA1S OR CACNL1A3 OR CACH1 OR CACN1 at 1792-1801 and may interact with Sequence 1328 in this patent.
LVRGGLGTLA

SEQ ID NO: 1328 - protein, 10 aa, Homo Sapiens
  sequence located in HTN3 OR HIS2 at 101-110 and may interact with Sequence 1327 in this patent.
SKSPEPSADE

SEQ ID NO: 1329 - protein, 10 aa, Homo Sapiens
  sequence located in CACNA1S OR CACNL1A3 OR CACH1 OR CACN1 at 1793-1802 and may interact with Sequence 1330 in this patent.
VRGGLGTLAA

SEQ ID NO: 1330 - protein, 10 aa, Homo Sapiens
  sequence located in HTN3 OR HIS2 at 100-109 and may interact with Sequence 1329 in this patent.
SSKSPEPSAD

SEQ ID NO: 1331 - protein, 10 aa, Homo Sapiens
  sequence located in CACNA1S OR CACNL1A3 OR CACH1 OR CACN1 at 1776-1785 and may interact with Sequence 1332 in this patent.
TSRCSAPATA

SEQ ID NO: 1332 - protein, 10 aa, Homo Sapiens
  sequence located in HMGCS1 OR HMGCS at 93-102 and may interact with Sequence 1331 in this patent.
GGGRGGGAGG

SEQ ID NO: 1333 - protein, 10 aa, Homo Sapiens
  sequence located in CACNA1S OR CACNL1A3 OR CACH1 OR CACN1 at 226-235 and may interact with Sequence 1334 in this patent.
CYFIGTDIVA

SEQ ID NO: 1334 - protein, 10 aa, Homo Sapiens
  sequence located in MLL OR HRX OR ALL1 OR TRX1 OR HTRX at 2479-2488 and may interact with Sequence 1333 in this patent.
CNNVSSDKIG

SEQ ID NO: 1335 - protein, 10 aa, Homo Sapiens
  sequence located in CACNA1S OR CACNL1A3 OR CACH1 OR CACN1 at 245-254 and may interact with Sequence 1336 in this patent.
CARTGSGRRC

SEQ ID NO: 1336 - protein, 10 aa, Homo Sapiens
  sequence located in MLL OR HRX OR ALL1 OR TRX1 OR HTRX at 3309-3318 and may interact with Sequence 1335 in this patent.
TAATAAGTST

SEQ ID NO: 1337 - protein, 10 aa, Homo Sapiens
  sequence located in CACNA1S OR CACNL1A3 OR CACH1 OR CACN1 at 245-254 and may interact with Sequence 1338 in this patent.
CARTGSGRRC

SEQ ID NO: 1338 - protein, 10 aa, Homo Sapiens
  sequence located in MLL OR HRX OR ALL1 OR TRX1 OR HTRX at 721-730 and may interact with Sequence 1337 in this patent.
RTSAGTSSSG

SEQ ID NO: 1339 - protein, 10 aa, Homo Sapiens
  sequence located in CACNA1S OR CACNL1A3 OR CACH1 OR CACN1 at 246-255 and may interact with Sequence 1340 in this patent.
ARTGSGRRCT

SEQ ID NO: 1340 - protein, 10 aa, Homo Sapiens
  sequence located in MLL OR HRX OR ALL1 OR TRX1 OR HTRX at 3308-3317 and may interact with Sequence 1339 in this patent.
GTAATAAGTS

SEQ ID NO: 1341 - protein, 10 aa, Homo Sapiens
  sequence located in CACNA1S OR CACNL1A3 OR CACH1 OR CACN1 at 156-165 and may interact with Sequence 1342 in this patent.
GAGLDVKALR

SEQ ID NO: 1342 - protein, 10 aa, Homo Sapiens
  sequence located in MLL OR HRX OR ALL1 OR TRX1 OR HTRX at 3764-3773 and may interact with Sequence 1341 in this patent.
ARAEVHLRKS

SEQ ID NO: 1343 - protein, 10 aa, Homo Sapiens
  sequence located in CACNA1S OR CACNL1A3 OR CACH1 OR CACN1 at 380-389 and may interact with Sequence 1344 in this patent.
DFREGKLSLD

SEQ ID NO: 1344 - protein, 10 aa, Homo Sapiens
  sequence located in HSPA8 OR HSC70 OR HSP73 at 16-25 and may interact with Sequence 1343 in this patent.
VETFAFQAEI

SEQ ID NO: 1345 - protein, 10 aa, Homo Sapiens
  sequence located in CACNA1S OR CACNL1A3 OR CACH1 OR CACN1 at 258-267 and may interact with Sequence 1346 in this patent.
GSECRGGWPG

SEQ ID NO: 1346 - protein, 10 aa, Homo Sapiens
  sequence located in HOXA9 OR HOX1G at 2-11 and may interact with Sequence 1345 in this patent.
PGPPPATLGS

SEQ ID NO: 1347 - protein, 10 aa, Homo Sapiens
  sequence located in CACNA1S OR CACNL1A3 OR CACH1 OR CACN1 at 1776-1785 and may interact with Sequence 1348 in this patent.
TSRCSAPATA

SEQ ID NO: 1348 - protein, 10 aa, Homo Sapiens
  sequence located in HOXA9 OR HOX1G at 314-323 and may interact with Sequence 1347 in this patent.
GGCWRARTRG

SEQ ID NO: 1349 - protein, 10 aa, Homo Sapiens
  sequence located in CACNA1S OR CACNL1A3 OR CACH1 OR CACN1 at 1208-1217 and may interact with Sequence 1350 in this patent.
SSGGLYCLGG

SEQ ID NO: 1350 - protein, 10 aa, Homo Sapiens
  sequence located in INSM1 OR IA1 at 211-220 and may interact with Sequence 1349 in this patent.
PAKAVKAPGA

SEQ ID NO: 1351 - protein, 10 aa, Homo Sapiens
  sequence located in CACNA1S OR CACNL1A3 OR CACH1 OR CACN1 at 1209-1218 and may interact with Sequence 1352 in this patent.
SGGLYCLGGG

SEQ ID NO: 1352 - protein, 10 aa, Homo Sapiens
  sequence located in INSM1 OR IA1 at 210-219 and may interact with Sequence 1351 in this patent.
PPAKAVKAPG

SEQ ID NO: 1353 - protein, 10 aa, Homo Sapiens
  sequence located in CACNA1S OR CACNL1A3 OR CACH1 OR CACN1 at 246-255 and may interact with Sequence 1354 in this patent.
ARTGSGRRCT

SEQ ID NO: 1354 - protein, 10 aa, Homo Sapiens
  sequence located in ID1 OR ID at 7-16 and may interact with Sequence 1353 in this patent.
STATAAAGPS

SEQ ID NO: 1355 - protein, 10 aa, Homo Sapiens
  sequence located in CACNA1S OR CACNL1A3 OR CACH1 OR CACN1 at 1776-1785 and may interact with Sequence 1356 in this patent.
TSRCSAPATA

SEQ ID NO: 1356 - protein, 10 aa, Homo Sapiens
  sequence located in EIF4H OR WBSCR1 OR WSCR1 at 17-26 and may interact with Sequence 1355 in this patent.
GGRGSRGSAG

SEQ ID NO: 1357 - protein, 10 aa, Homo Sapiens
  sequence located in CACNA1S OR CACNL1A3 OR CACH1 OR CACN1 at 241-250 and may interact with Sequence 1358 in this patent.
EPSPCARTGS

SEQ ID NO: 1358 - protein, 10 aa, Homo Sapiens
  sequence located in EIF4H OR WBSCR1 OR WSCR1 at 143-152 and may interact with Sequence 1357 in this patent.
LGGRGGSRPG

SEQ ID NO: 1359 - protein, 10 aa, Homo Sapiens
  sequence located in CACNA1S OR CACNL1A3 OR CACH1 OR CACN1 at 240-249 and may interact with Sequence 1360 in this patent.
EEPSPCARTG

SEQ ID NO: 1360 - protein, 10 aa, Homo Sapiens
  sequence located in EIF4H OR WBSCR1 OR WSCR1 at 142-151 and may interact with Sequence 1359 in this patent.
FLGGRGGSRP

SEQ ID NO: 1361 - protein, 10 aa, Homo Sapiens
  sequence located in CACNA1S OR CACNL1A3 OR CACH1 OR CACN1 at 249-258 and may interact with Sequence 1362 in this patent.
GSGRRCTING

SEQ ID NO: 1362 - protein, 10 aa, Homo Sapiens
  sequence located in GIF OR IFMH at 304-313 and may interact with Sequence 1361 in this patent.
PGPTSASNIT

SEQ ID NO: 1363 - protein, 10 aa, Homo Sapiens
  sequence located in CACNA1S OR CACNL1A3 OR CACH1 OR CACN1 at 248-257 and may interact with Sequence 1364 in this patent.
TGSGRRCTIN

SEQ ID NO: 1364 - protein, 10 aa, Homo Sapiens
  sequence located in GIF OR IFMH at 303-312 and may interact with Sequence 1363 in this patent.
GPGPTSASNI

SEQ ID NO: 1365 - protein, 10 aa, Homo Sapiens
  sequence located in CACNA1S OR CACNL1A3 OR CACH1 OR CACN1 at 247-256 and may interact with Sequence 1366 in this patent.
RTGSGRRCTI

SEQ ID NO: 1366 - protein, 10 aa, Homo Sapiens
  sequence located in GIF OR IFMH at 302-311 and may interact with Sequence 1365 in this patent.
PGPGPTSASN

SEQ ID NO: 1367 - protein, 10 aa, Homo Sapiens
  sequence located in CACNA1S OR CACNL1A3 OR CACH1 OR CACN1 at 1776-1785 and may interact with Sequence 1368 in this patent.
TSRCSAPATA

SEQ ID NO: 1368 - protein, 10 aa, Homo Sapiens
  sequence located in IL9 at 11-20 and may interact with Sequence 1367 in this patent.
GTTRARGRGR

SEQ ID NO: 1369 - protein, 10 aa, Homo Sapiens
  sequence located in CACNA1S OR CACNL1A3 OR CACH1 OR CACN1 at 1227-1236 and may interact with Sequence 1370 in this patent.
SARISSAFFR

SEQ ID NO: 1370 - protein, 10 aa, Homo Sapiens
  sequence located in KRT9 at 596-605 and may interact with Sequence 1369 in this patent.
GGSYGGGEEA

SEQ ID NO: 1371 - protein, 10 aa, Homo Sapiens
  sequence located in CACNA1S OR CACNL1A3 OR CACH1 OR CACN1 at 1776-1785 and may interact with Sequence 1372 in this patent.
TSRCSAPATA

SEQ ID NO: 1372 - protein, 10 aa, Homo Sapiens
  sequence located in KRT2E at 564-573 and may interact with Sequence 1371 in this patent.
SGSTGGRGSS

SEQ ID NO: 1373 - protein, 10 aa, Homo Sapiens
  sequence located in CACNA1S OR CACNL1A3 OR CACH1 OR CACN1 at 1776-1785 and may interact with Sequence 1374 in this patent.
TSRCSAPATA

SEQ ID NO: 1374 - protein, 10 aa, Homo Sapiens
  sequence located in KRT1 OR KRTA at 596-605 and may interact with Sequence 1373 in this patent.
GSSGGRGSGG

SEQ ID NO: 1375 - protein, 10 aa, Homo Sapiens
  sequence located in CACNA1S OR CACNL1A3 OR CACH1 OR CACN1 at 1736-1745 and may interact with Sequence 1376 in this patent.
APPAPCQCPR

SEQ ID NO: 1376 - protein, 10 aa, Homo Sapiens
  sequence located in KRT6A OR K6A at 40-49 and may interact with Sequence 1375 in this patent.
SRGSGGLGGA

SEQ ID NO: 1377 - protein, 10 aa, Homo Sapiens
  sequence located in CACNA1S OR CACNL1A3 OR CACH1 OR CACN1 at 1736-1745 and may interact with Sequence 1378 in this patent.
APPAPCQCPR

SEQ ID NO: 1378 - protein, 10 aa, Homo Sapiens
  sequence located in KRT6B OR K6B at 40-49 and may interact with Sequence 1377 in this patent.
SRGSGGLGGA

SEQ ID NO: 1379 - protein, 10 aa, Homo Sapiens
  sequence located in CACNA1S OR CACNL1A3 OR CACH1 OR CACN1 at 1736-1745 and may interact with Sequence 1380 in this patent.
APPAPCQCPR

SEQ ID NO: 1380 - protein, 10 aa, Homo Sapiens
  sequence located in KRT6F at 40-49 and may interact with Sequence 1379 in this patent.
SRGSGGLGGA

SEQ ID NO: 1381 - protein, 10 aa, Homo Sapiens
  sequence located in CACNA1S OR CACNL1A3 OR CACH1 OR CACN1 at 244-253 and may interact with Sequence 1382 in this patent.
PCARTGSGRR

SEQ ID NO: 1382 - protein, 10 aa, Homo Sapiens
  sequence located in DAGK4 at 15-24 and may interact with Sequence 1381 in this patent.
GGSPRPGSPA

SEQ ID NO: 1383 - protein, 10 aa, Homo Sapiens
  sequence located in CACNA1S OR CACNL1A3 OR CACH1 OR CACN1 at 243-252 and may interact with Sequence 1384 in this patent.
SPCARTGSGR

SEQ ID NO: 1384 - protein, 10 aa, Homo Sapiens
  sequence located in DAGK4 at 14-23 and may interact with Sequence 1383 in this patent.
GGGSPRPGSP

SEQ ID NO: 1385 - protein, 10 aa, Homo Sapiens
  sequence located in CACNA1S OR CACNL1A3 OR CACH1 OR CACN1 at 242-251 and may interact with Sequence 1386 in this patent.
PSPCARTGSG

SEQ ID NO: 1386 - protein, 10 aa, Homo Sapiens
  sequence located in DAGK4 at 32-41 and may interact with Sequence 1385 in this patent.
GGRARPGPGP

SEQ ID NO: 1387 - protein, 10 aa, Homo Sapiens
  sequence located in CACNA1S OR CACNL1A3 OR CACH1 OR CACN1 at 1776-1785 and may interact with Sequence 1388 in this patent.
TSRCSAPATA

SEQ ID NO: 1388 - protein, 10 aa, Homo Sapiens
  sequence located in KIF1C at 1036-1045 and may interact with Sequence 1387 in this patent.
GGGRSRGAGS

SEQ ID NO: 1389 - protein, 10 aa, Homo Sapiens
  sequence located in CACNA1S OR CACNL1A3 OR CACH1 OR CACN1 at 1776-1785 and may interact with Sequence 1390 in this patent.
TSRCSAPATA

SEQ ID NO: 1390 - protein, 10 aa, Homo Sapiens
  sequence located in CSF1R OR FMS at 928-937 and may interact with Sequence 1389 in this patent.
SSSRSGGSGS

SEQ ID NO: 1391 - protein, 10 aa, Homo Sapiens
  sequence located in CACNA1S OR CACNL1A3 OR CACH1 OR CACN1 at 1776-1785 and may interact with Sequence 1392 in this patent.
TSRCSAPATA

SEQ ID NO: 1392 - protein, 10 aa, Homo Sapiens
  sequence located in CSF1R OR FMS at 930-939 and may interact with Sequence 1391 in this patent.
SRSGGSGSSS

SEQ ID NO: 1393 - protein, 10 aa, Homo Sapiens
  sequence located in CACNA1S OR CACNL1A3 OR CACH1 OR CACN1 at 1210-1219 and may interact with Sequence 1394 in this patent.
GGLYCLGGGC

SEQ ID NO: 1394 - protein, 10 aa, Homo Sapiens
  sequence located in MKI67 at 3053-3062 and may interact with Sequence 1393 in this patent.
RTSAKRIEPA

SEQ ID NO: 1395 - protein, 10 aa, Homo Sapiens
  sequence located in CACNA1S OR CACNL1A3 OR CACH1 OR CACN1 at 1776-1785 and may interact with Sequence 1396 in this patent.
TSRCSAPATA

SEQ ID NO: 1396 - protein, 10 aa, Homo Sapiens
  sequence located in KLK2 at 264-273 and may interact with Sequence 1395 in this patent.
SGGRGGAAGG

SEQ ID NO: 1397 - protein, 10 aa, Homo Sapiens
  sequence located in CACNA1S OR CACNL1A3 OR CACH1 OR CACN1 at 1776-1785 and may interact with Sequence 1398 in this patent.
TSRCSAPATA

SEQ ID NO: 1398 - protein, 10 aa, Homo Sapiens
  sequence located in KLK2 at 263-272 and may interact with Sequence 1397 in this patent.
GSGGRGGAAG

SEQ ID NO: 1399 - protein, 10 aa, Homo Sapiens
  sequence located in CACNA1S OR CACNL1A3 OR CACH1 OR CACN1 at 1461-1470 and may interact with Sequence 1400 in this patent.
VTFNATLFAL

SEQ ID NO: 1400 - protein, 10 aa, Homo Sapiens
  sequence located in RPS6KA3 OR RSK2 OR ISPK1 at 170-179 and may interact with Sequence 1399 in this patent.
HGKISREESE

SEQ ID NO: 1401 - protein, 10 aa, Homo Sapiens
  sequence located in CACNA1S OR CACNL1A3 OR CACH1 OR CACN1 at 1732-1741 and may interact with Sequence 1402 in this patent.
PRGQAPPAPC

SEQ ID NO: 1402 - protein, 10 aa, Homo Sapiens
  sequence located in LH2 at 48-57 and may interact with Sequence 1401 in this patent.
RAALCGGCGG

SEQ ID NO: 1403 - protein, 10 aa, Homo Sapiens
  sequence located in CACNA1S OR CACNL1A3 OR CACH1 OR CACN1 at 247-256 and may interact with Sequence 1404 in this patent.
RTGSGRRCTI

SEQ ID NO: 1404 - protein, 10 aa, Homo Sapiens
  sequence located in LYN at 97-106 and may interact with Sequence 1403 in this patent.
NRTAAARTRT

SEQ ID NO: 1405 - protein, 10 aa, Homo Sapiens
  sequence located in CACNA1S OR CACNL1A3 OR CACH1 OR CACN1 at 243-252 and may interact with Sequence 1406 in this patent.
SPCARTGSGR

SEQ ID NO: 1406 - protein, 10 aa, Homo Sapiens
  sequence located in M17S2 OR 1A13B at 1-10 and may interact with Sequence 1405 in this patent.
AATASAGAGG

SEQ ID NO: 1407 - protein, 10 aa, Homo Sapiens
  sequence located in CACNA1S OR CACNL1A3 OR CACH1 OR CACN1 at 1770-1779 and may interact with Sequence 1408 in this patent.
RSTRENTSRC

SEQ ID NO: 1408 - protein, 10 aa, Homo Sapiens
  sequence located in M17S2 OR 1A13B at 130-139 and may interact with Sequence 1407 in this patent.
ATGAFVGTPA

SEQ ID NO: 1409 - protein, 10 aa, Homo Sapiens
  sequence located in CACNA1S OR CACNL1A3 OR CACH1 OR CACN1 at 1769-1778 and may interact with Sequence 1410 in this patent.
SRSTRENTSR

SEQ ID NO: 1410 - protein, 10 aa, Homo Sapiens
  sequence located in M17S2 OR 1A13B at 129-138 and may interact with Sequence 1409 in this patent.
GATGAFVGTP

SEQ ID NO: 1411 - protein, 10 aa, Homo Sapiens
  sequence located in CACNA1S OR CACNL1A3 OR CACH1 OR CACN1 at 84-93 and may interact with Sequence 1412 in this patent.
LGLEKLEYFF

SEQ ID NO: 1412 - protein, 10 aa, Homo Sapiens
  sequence located in MCM4 OR CDC21 at 387-396 and may interact with Sequence 1411 in this patent.
KSQLLKFVEK

SEQ ID NO: 1413 - protein, 10 aa, Homo Sapiens
  sequence located in CACNA1S OR CACNL1A3 OR CACH1 OR CACN1 at 28-37 and may interact with Sequence 1414 in this patent.
PRALFCLTLE

SEQ ID NO: 1414 - protein, 10 aa, Homo Sapiens
  sequence located in MAT1A OR MATA1 OR AMS1 at 336-345 and may interact with Sequence 1413 in this patent.
GTSQKTEREL

SEQ ID NO: 1415 - protein, 10 aa, Homo Sapiens
  sequence located in CACNA1S OR CACNL1A3 OR CACH1 OR CACN1 at 243-252 and may interact with Sequence 1416 in this patent.
SPCARTGSGR

SEQ ID NO: 1416 - protein, 10 aa, Homo Sapiens
  sequence located in MTNR1B at 31-40 and may interact with Sequence 1415 in this patent.
RGGGSCSGSA

SEQ ID NO: 1417 - protein, 10 aa, Homo Sapiens
  sequence located in CACNA1S OR CACNL1A3 OR CACH1 OR CACN1 at 245-254 and may interact with Sequence 1418 in this patent.
CARTGSGRRC

SEQ ID NO: 1418 - protein, 10 aa, Homo Sapiens
  sequence located in PHC at 166-175 and may interact with Sequence 1417 in this patent.
AGSGAASSSG

SEQ ID NO: 1419 - protein, 10 aa, Homo Sapiens
  sequence located in CACNA1S OR CACNL1A3 OR CACH1 OR CACN1 at 1773-1782 and may interact with Sequence 1420 in this patent.
RENTSRCSAP

SEQ ID NO: 1420 - protein, 10 aa, Homo Sapiens
  sequence located in M6PR OR MPRD OR MPR46 at 611-620 and may interact with Sequence 1419 in this patent.
WRTAAACVLS

SEQ ID NO: 1421 - protein, 10 aa, Homo Sapiens
  sequence located in CACNA1S OR CACNL1A3 OR CACH1 OR CACN1 at 1707-1716 and may interact with Sequence 1422 in this patent.
PCRVLGPHSK

SEQ ID NO: 1422 - protein, 10 aa, Homo Sapiens
  sequence located in Unknown at 336-345 and may interact with Sequence 1421 in this patent.
LGMWTEDPRR

SEQ ID NO: 1423 - protein, 10 aa, Homo Sapiens
  sequence located in CACNA1S OR CACNL1A3 OR CACH1 OR CACN1 at 1708-1717 and may interact with Sequence 1424 in this patent.
CRVLGPHSKP

SEQ ID NO: 1424 - protein, 10 aa, Homo Sapiens
  sequence located in Unknown at 335-344 and may interact with Sequence 1423 in this patent.
RLGMWTEDPR

SEQ ID NO: 1425 - protein, 10 aa, Homo Sapiens
  sequence located in CACNA1S OR CACNL1A3 OR CACH1 OR CACN1 at 246-255 and may interact with Sequence 1426 in this patent.
ARTGSGRRCT

SEQ ID NO: 1426 - protein, 10 aa, Homo Sapiens
  sequence located in MCAM OR MUC18 at 978-987 and may interact with Sequence 1425 in this patent.
SARATTTPAS

SEQ ID NO: 1427 - protein, 10 aa, Homo Sapiens
  sequence located in CACNA1S OR CACNL1A3 OR CACH1 OR CACN1 at 245-254 and may interact with Sequence 1428 in this patent.
CARTGSGRRC

SEQ ID NO: 1428 - protein, 10 aa, Homo Sapiens
  sequence located in MCAM OR MUC18 at 977-986 and may interact with Sequence 1427 in this patent.
TSARATTTPA

SEQ ID NO: 1429 - protein, 10 aa, Homo Sapiens
  sequence located in CACNA1S OR CACNL1A3 OR CACH1 OR CACN1 at 244-253 and may interact with Sequence 1430 in this patent.
PCARTGSGRR

SEQ ID NO: 1430 - protein, 10 aa, Homo Sapiens
  sequence located in MCAM OR MUC18 at 976-985 and may interact with Sequence 1429 in this patent.
GTSARATTTP

SEQ ID NO: 1431 - protein, 10 aa, Homo Sapiens
  sequence located in CACNA1S OR CACNL1A3 OR CACH1 OR CACN1 at 244-253 and may interact with Sequence 1432 in this patent.
PCARTGSGRR

SEQ ID NO: 1432 - protein, 10 aa, Homo Sapiens
  sequence located in MUC5AC OR MUC5 at 1006-1015 and may interact with Sequence 1431 in this patent.
APATPSTRRR

SEQ ID NO: 1433 - protein, 10 aa, Homo Sapiens
  sequence located in CACNA1S OR CACNL1A3 OR CACH1 OR CACN1 at 244-253 and may interact with Sequence 1434 in this patent.
PCARTGSGRR

SEQ ID NO: 1434 - protein, 10 aa, Homo Sapiens
  sequence located in MYH10 at 1201-1210 and may interact with Sequence 1433 in this patent.
STPATSAGGG

SEQ ID NO: 1435 - protein, 10 aa, Homo Sapiens
  sequence located in CACNA1S OR CACNL1A3 OR CACH1 OR CACN1 at 1846-1855 and may interact with Sequence 1436 in this patent.
LGCLNLGSSL

SEQ ID NO: 1436 - protein, 10 aa, Homo Sapiens
  sequence located in SLC12A2 OR NKCC1 at 281-290 and may interact with Sequence 1435 in this patent.
KRRPKVKRSK

SEQ ID NO: 1437 - protein, 10 aa, Homo Sapiens
  sequence located in CACNA1S OR CACNL1A3 OR CACH1 OR CACN1 at 244-253 and may interact with Sequence 1438 in this patent.
PCARTGSGRR

SEQ ID NO: 1438 - protein, 10 aa, Homo Sapiens
  sequence located in SLC12A2 OR NKCC1 at 584-593 and may interact with Sequence 1437 in this patent.
RGSSRSRTAS

SEQ ID NO: 1439 - protein, 10 aa, Homo Sapiens
  sequence located in CACNA1S OR CACNL1A3 OR CACH1 OR CACN1 at 246-255 and may interact with Sequence 1440 in this patent.
ARTGSGRRCT

SEQ ID NO: 1440 - protein, 10 aa, Homo Sapiens
  sequence located in NAP1L1 OR NRP at 52-61 and may interact with Sequence 1439 in this patent.
SGSSSGSGSS

SEQ ID NO: 1441 - protein, 10 aa, Homo Sapiens
  sequence located in CACNA1S OR CACNL1A3 OR CACH1 OR CACN1 at 1690-1699 and may interact with Sequence 1442 in this patent.
FPEETETPAT

SEQ ID NO: 1442 - protein, 10 aa, Homo Sapiens
  sequence located in SLC11A1 OR NRAMP1 OR NRAMP at 388-397 and may interact with Sequence 1441 in this patent.
EGFLRLRWSR

SEQ ID NO: 1443 - protein, 10 aa, Homo Sapiens
  sequence located in CACNA1S OR CACNL1A3 OR CACH1 OR CACN1 at 243-252 and may interact with Sequence 1444 in this patent.
SPCARTGSGR

SEQ ID NO: 1444 - protein, 10 aa, Homo Sapiens
  sequence located in NTAK at 681-690 and may interact with Sequence 1443 in this patent.
AAGPGPRRGT

SEQ ID NO: 1445 - protein, 10 aa, Homo Sapiens
  sequence located in CACNA1S OR CACNL1A3 OR CACH1 OR CACN1 at 244-253 and may interact with Sequence 1446 in this patent.
PCARTGSGRR

SEQ ID NO: 1446 - protein, 10 aa, Homo Sapiens
  sequence located in NTAK at 680-689 and may interact with Sequence 1445 in this patent.
PAAGPGPRRG

SEQ ID NO: 1447 - protein, 10 aa, Homo Sapiens
  sequence located in CACNA1S OR CACNL1A3 OR CACH1 OR CACN1 at 255-264 and may interact with Sequence 1448 in this patent.
TINGSECRGG

SEQ ID NO: 1448 - protein, 10 aa, Homo Sapiens
  sequence located in NTAK at 591-600 and may interact with Sequence 1447 in this patent.
RYVSALTTPA

SEQ ID NO: 1449 - protein, 10 aa, Homo Sapiens
  sequence located in CACNA1S OR CACNL1A3 OR CACH1 OR CACN1 at 1776-1785 and may interact with Sequence 1450 in this patent.
TSRCSAPATA

SEQ ID NO: 1450 - protein, 10 aa, Homo Sapiens
  sequence located in OSBP at 80-89 and may interact with Sequence 1449 in this patent.
GGSGAGGSGS

SEQ ID NO: 1451 - protein, 10 aa, Homo Sapiens
  sequence located in CACNA1S OR CACNL1A3 OR CACH1 OR CACN1 at 245-254 and may interact with Sequence 1452 in this patent.
CARTGSGRRC

SEQ ID NO: 1452 - protein, 10 aa, Homo Sapiens
  sequence located in OSBP at 39-48 and may interact with Sequence 1451 in this patent.
AGPGSGAASG

SEQ ID NO: 1453 - protein, 10 aa, Homo Sapiens
  sequence located in CACNA1S OR CACNL1A3 OR CACH1 OR CACN1 at 1338-1347 and may interact with Sequence 1454 in this patent.
CDPESDYAPG

SEQ ID NO: 1454 - protein, 10 aa, Homo Sapiens
  sequence located in P2RY5 at 139-148 and may interact with Sequence 1453 in this patent.
GVWLTVIGGS

SEQ ID NO: 1455 - protein, 10 aa, Homo Sapiens
  sequence located in CACNA1S OR CACNL1A3 OR CACH1 OR CACN1 at 1384-1393 and may interact with Sequence 1456 in this patent.
FDYLTRDWSI

SEQ ID NO: 1456 - protein, 10 aa, Homo Sapiens
  sequence located in PDNP1 OR PC1 OR NPPS at 330-339 and may interact with Sequence 1455 in this patent.
YGPVSSEVIK

SEQ ID NO: 1457 - protein, 10 aa, Homo Sapiens
  sequence located in CACNA1S OR CACNL1A3 OR CACH1 OR CACN1 at 1085-1094 and may interact with Sequence 1458 in this patent.
QRQCVQYALK

SEQ ID NO: 1458 - protein, 10 aa, Homo Sapiens
  sequence located in PTGER3 at 95-104 and may interact with Sequence 1457 in this patent.
LALTDLVGQL

SEQ ID NO: 1459 - protein, 10 aa, Homo Sapiens
  sequence located in CACNA1S OR CACNL1A3 OR CACH1 OR CACN1 at 444-453 and may interact with Sequence 1460 in this patent.
LNTLSIASEH

SEQ ID NO: 1460 - protein, 10 aa, Homo Sapiens
  sequence located in PEDF at 181-190 and may interact with Sequence 1459 in this patent.
EVSKRYGGFM

SEQ ID NO: 1461 - protein, 10 aa, Homo Sapiens
  sequence located in CACNA1S OR CACNL1A3 OR CACH1 OR CACN1 at 1023-1032 and may interact with Sequence 1462 in this patent.
AIDSNAEDVG

SEQ ID NO: 1462 - protein, 10 aa, Homo Sapiens
  sequence located in PLOD1 OR PLOD OR LLH at 718-727 and may interact with Sequence 1461 in this patent.
RYIAVSFVDP

SEQ ID NO: 1463 - protein, 10 aa, Homo Sapiens
  sequence located in CACNA1S OR CACNL1A3 OR CACH1 OR CACN1 at 1023-1032 and may interact with Sequence 1464 in this patent.
AIDSNAEDVG

SEQ ID NO: 1464 - protein, 10 aa, Homo Sapiens
  sequence located in PLOD2 at 728-737 and may interact with Sequence 1463 in this patent.
RYIAVSFIDP

SEQ ID NO: 1465 - protein, 10 aa, Homo Sapiens
  sequence located in CACNA1S OR CACNL1A3 OR CACH1 OR CACN1 at 254-263 and may interact with Sequence 1466 in this patent.
CTINGSECRG

SEQ ID NO: 1466 - protein, 10 aa, Homo Sapiens
  sequence located in Unknown at 196-205 and may interact with Sequence 1465 in this patent.
TPTLTSIYCR

SEQ ID NO: 1467 - protein, 10 aa, Homo Sapiens
  sequence located in CACNA1S OR CACNL1A3 OR CACH1 OR CACN1 at 249-258 and may interact with Sequence 1468 in this patent.
GSGRRCTING

SEQ ID NO: 1468 - protein, 10 aa, Homo Sapiens
  sequence located in PRCC OR TPRC at 52-61 and may interact with Sequence 1467 in this patent.
SRTTTGSYIA

SEQ ID NO: 1469 - protein, 10 aa, Homo Sapiens
  sequence located in CACNA1S OR CACNL1A3 OR CACH1 OR CACN1 at 246-255 and may interact with Sequence 1470 in this patent.
ARTGSGRRCT

SEQ ID NO: 1470 - protein, 10 aa, Homo Sapiens
  sequence located in PSF at 139-148 and may interact with Sequence 1469 in this patent.
SGAPPGSGPG

SEQ ID NO: 1471 - protein, 10 aa, Homo Sapiens
  sequence located in CACNA1S OR CACNL1A3 OR CACH1 OR CACN1 at 1776-1785 and may interact with Sequence 1472 in this patent.
TSRCSAPATA

SEQ ID NO: 1472 - protein, 10 aa, Homo Sapiens
  sequence located in PTB at 25-34 and may interact with Sequence 1471 in this patent.
GRPAGGGRRR

SEQ ID NO: 1473 - protein, 10 aa, Homo Sapiens
  sequence located in CACNA1S OR CACNL1A3 OR CACH1 OR CACN1 at 255-264 and may interact with Sequence 1474 in this patent.
TINGSECRGG

SEQ ID NO: 1474 - protein, 10 aa, Homo Sapiens
  sequence located in PTPRG at 171-180 and may interact with Sequence 1473 in this patent.
CNITGLRPAT

SEQ ID NO: 1475 - protein, 10 aa, Homo Sapiens
  sequence located in CACNA1S OR CACNL1A3 OR CACH1 OR CACN1 at 1776-1785 and may interact with Sequence 1476 in this patent.
TSRCSAPATA

SEQ ID NO: 1476 - protein, 10 aa, Homo Sapiens
  sequence located in RFX5 at 125-134 and may interact with Sequence 1475 in this patent.
GGARRRGSGG

SEQ ID NO: 1477 - protein, 10 aa, Homo Sapiens
  sequence located in CACNA1S OR CACNL1A3 OR CACH1 OR CACN1 at 1228-1237 and may interact with Sequence 1478 in this patent.
ARISSAFFRL

SEQ ID NO: 1478 - protein, 10 aa, Homo Sapiens
  sequence located in RGS13 at 50-59 and may interact with Sequence 1477 in this patent.
SPDATRKKPK

SEQ ID NO: 1479 - protein, 10 aa, Homo Sapiens
  sequence located in CACNA1S OR CACNL1A3 OR CACH1 OR CACN1 at 1227-1236 and may interact with Sequence 1480 in this patent.
SARISSAFFR

SEQ ID NO: 1480 - protein, 10 aa, Homo Sapiens
  sequence located in RGS13 at 49-58 and may interact with Sequence 1479 in this patent.
GSPDATRKKP

SEQ ID NO: 1481 - protein, 10 aa, Homo Sapiens
  sequence located in CACNA1S OR CACNL1A3 OR CACH1 OR CACN1 at 1226-1235 and may interact with Sequence 1482 in this patent.
ESARISSAFF

SEQ ID NO: 1482 - protein, 10 aa, Homo Sapiens
  sequence located in RGS13 at 48-57 and may interact with Sequence 1481 in this patent.
LGSPDATRKK

SEQ ID NO: 1483 - protein, 10 aa, Homo Sapiens
  sequence located in CACNA1S OR CACNL1A3 OR CACH1 OR CACN1 at 1776-1785 and may interact with Sequence 1484 in this patent.
TSRCSAPATA

SEQ ID NO: 1484 - protein, 10 aa, Homo Sapiens
  sequence located in RPS29 at 43-52 and may interact with Sequence 1483 in this patent.
GRGRGRGARG

SEQ ID NO: 1485 - protein, 10 aa, Homo Sapiens
  sequence located in CACNA1S OR CACNL1A3 OR CACH1 OR CACN1 at 246-255 and may interact with Sequence 1486 in this patent.
ARTGSGRRCT

SEQ ID NO: 1486 - protein, 10 aa, Homo Sapiens
  sequence located in SFRS3 OR SRP20 OR X16 at 480-489 and may interact with Sequence 1485 in this patent.
SRSPSRSRSR

SEQ ID NO: 1487 - protein, 10 aa, Homo Sapiens
  sequence located in CACNA1S OR CACNL1A3 OR CACH1 OR CACN1 at 1696-1705 and may interact with Sequence 1488 in this patent.
TPATRGRALG

SEQ ID NO: 1488 - protein, 10 aa, Homo Sapiens
  sequence located in SFRS5 OR SRP40 OR HRS at 319-328 and may interact with Sequence 1487 in this patent.
PKRATSRSRS

SEQ ID NO: 1489 - protein, 10 aa, Homo Sapiens
  sequence located in CACNA1S OR CACNL1A3 OR CACH1 OR CACN1 at 245-254 and may interact with Sequence 1490 in this patent.
CARTGSGRRC

SEQ ID NO: 1490 - protein, 10 aa, Homo Sapiens
  sequence located in SFRS8 OR SWAP at 429-438 and may interact with Sequence 1489 in this patent.
TSSGATSTTT

SEQ ID NO: 1491 - protein, 10 aa, Homo Sapiens
  sequence located in CACNA1S OR CACNL1A3 OR CACH1 OR CACN1 at 1698-1707 and may interact with Sequence 1492 in this patent.
ATRGRALGQP

SEQ ID NO: 1492 - protein, 10 aa, Homo Sapiens
  sequence located in SMOH at 65-74 and may interact with Sequence 1491 in this patent.
GRAAPCEPLR

SEQ ID NO: 1493 - protein, 10 aa, Homo Sapiens
  sequence located in CACNA1S OR CACNL1A3 OR CACH1 OR CACN1 at 1071-1080 and may interact with Sequence 1494 in this patent.
QGETEYKNCE

SEQ ID NO: 1494 - protein, 10 aa, Homo Sapiens
  sequence located in SMOH at 458-467 and may interact with Sequence 1493 in this patent.
LAFGFVLITF

SEQ ID NO: 1495 - protein, 10 aa, Homo Sapiens
  sequence located in CACNA1S OR CACNL1A3 OR CACH1 OR CACN1 at 1070-1079 and may interact with Sequence 1496 in this patent.
EQGETEYKNC

SEQ ID NO: 1496 - protein, 10 aa, Homo Sapiens
  sequence located in SMOH at 457-466 and may interact with Sequence 1495 in this patent.
FLAFGFVLIT

SEQ ID NO: 1497 - protein, 10 aa, Homo Sapiens
  sequence located in CACNA1S OR CACNL1A3 OR CACH1 OR CACN1 at 246-255 and may interact with Sequence 1498 in this patent.
ARTGSGRRCT

SEQ ID NO: 1498 - protein, 10 aa, Homo Sapiens
  sequence located in SMARCA2 OR SNF2L2 OR BRM OR SNF2A at 44-53 and may interact with Sequence 1497 in this patent.
GPSPGPPSAG

SEQ ID NO: 1499 - protein, 10 aa, Homo Sapiens
  sequence located in CACNA1S OR CACNL1A3 OR CACH1 OR CACN1 at 246-255 and may interact with Sequence 1500 in this patent.
ARTGSGRRCT

SEQ ID NO: 1500 - protein, 10 aa, Homo Sapiens
  sequence located in SMARCA2 OR SNF2L2 OR BRM OR SNF2A at 29-38 and may interact with Sequence 1499 in this patent.
GPSPGPSPGS

SEQ ID NO: 1501 - protein, 10 aa, Homo Sapiens
  sequence located in CACNA1S OR CACNL1A3 OR CACH1 OR CACN1 at 246-255 and may interact with Sequence 1502 in this patent.
ARTGSGRRCT

SEQ ID NO: 1502 - protein, 10 aa, Homo Sapiens
  sequence located in GH2 at 912-921 and may interact with Sequence 1501 in this patent.
RARSRTPSRR

SEQ ID NO: 1503 - protein, 10 aa, Homo Sapiens
  sequence located in CACNA1S OR CACNL1A3 OR CACH1 OR CACN1 at 1694-1703 and may interact with Sequence 1504 in this patent.
TETPATRGRA

SEQ ID NO: 1504 - protein, 10 aa, Homo Sapiens
  sequence located in SOX4 at 338-347 and may interact with Sequence 1503 in this patent.
SLSGRSSAAS

SEQ ID NO: 1505 - protein, 10 aa, Homo Sapiens
  sequence located in CACNA1S OR CACNL1A3 OR CACH1 OR CACN1 at 245-254 and may interact with Sequence 1506 in this patent.
CARTGSGRRC

SEQ ID NO: 1506 - protein, 10 aa, Homo Sapiens
  sequence located in SOX4 at 341-350 and may interact with Sequence 1505 in this patent.
GRSSAASSPA

SEQ ID NO: 1507 - protein, 10 aa, Homo Sapiens
  sequence located in CACNA1S OR CACNL1A3 OR CACH1 OR CACN1 at 1776-1785 and may interact with Sequence 1508 in this patent.
TSRCSAPATA

SEQ ID NO: 1508 - protein, 10 aa, Homo Sapiens
  sequence located in SPTA1 OR SPTA at 8-17 and may interact with Sequence 1507 in this patent.
GRSGGSGGCS

SEQ ID NO: 1509 - protein, 10 aa, Homo Sapiens
  sequence located in CACNA1S OR CACNL1A3 OR CACH1 OR CACN1 at 1776-1785 and may interact with Sequence 1510 in this patent.
TSRCSAPATA

SEQ ID NO: 1510 - protein, 10 aa, Homo Sapiens
  sequence located in SRC OR SRC1 at 446-455 and may interact with Sequence 1509 in this patent.
RGSGSGGSGS

SEQ ID NO: 1511 - protein, 10 aa, Homo Sapiens
  sequence located in CACNA1S OR CACNL1A3 OR CACH1 OR CACN1 at 387-396 and may interact with Sequence 1512 in this patent.
SLDEGGSDTE

SEQ ID NO: 1512 - protein, 10 aa, Homo Sapiens
  sequence located in SSR4 at 149-158 and may interact with Sequence 1511 in this patent.
TEVLAAAIGL

SEQ ID NO: 1513 - protein, 10 aa, Homo Sapiens
  sequence located in CACNA1S OR CACNL1A3 OR CACH1 OR CACN1 at 672-681 and may interact with Sequence 1514 in this patent.
SAQKAKAEEK

SEQ ID NO: 1514 - protein, 10 aa, Homo Sapiens
  sequence located in STAT6 at 295-304 and may interact with Sequence 1513 in this patent.
FLLGLRFLGA

SEQ ID NO: 1515 - protein, 10 aa, Homo Sapiens
  sequence located in CACNA1S OR CACNL1A3 OR CACH1 OR CACN1 at 1772-1781 and may interact with Sequence 1516 in this patent.
TRENTSRCSA

SEQ ID NO: 1516 - protein, 10 aa, Homo Sapiens
  sequence located in STAR at 192-201 and may interact with Sequence 1515 in this patent.
RRGSTCVLAG

SEQ ID NO: 1517 - protein, 10 aa, Homo Sapiens
  sequence located in CACNA1S OR CACNL1A3 OR CACH1 OR CACN1 at 247-256 and may interact with Sequence 1518 in this patent.
RTGSGRRCTI

SEQ ID NO: 1518 - protein, 10 aa, Homo Sapiens
  sequence located in VAMP3 OR SYB3 at 3-12 and may interact with Sequence 1517 in this patent.
TGPTAATGSN

SEQ ID NO: 1519 - protein, 10 aa, Homo Sapiens
  sequence located in CACNA1S OR CACNL1A3 OR CACH1 OR CACN1 at 246-255 and may interact with Sequence 1520 in this patent.
ARTGSGRRCT

SEQ ID NO: 1520 - protein, 10 aa, Homo Sapiens
  sequence located in VAMP3 OR SYB3 at 2-11 and may interact with Sequence 1519 in this patent.
STGPTAATGS

SEQ ID NO: 1521 - protein, 10 aa, Homo Sapiens
  sequence located in CACNA1S OR CACNL1A3 OR CACH1 OR CACN1 at 245-254 and may interact with Sequence 1522 in this patent.
CARTGSGRRC

SEQ ID NO: 1522 - protein, 10 aa, Homo Sapiens
  sequence located in TAF2C1 OR TAF2C OR TAFII135 OR TAFII130 at 305-314 and may interact with Sequence 1521 in this patent.
GSAGAAPAPA

SEQ ID NO: 1523 - protein, 10 aa, Homo Sapiens
  sequence located in CACNA1S OR CACNL1A3 OR CACH1 OR CACN1 at 244-253 and may interact with Sequence 1524 in this patent.
PCARTGSGRR

SEQ ID NO: 1524 - protein, 10 aa, Homo Sapiens
  sequence located in TAF2C1 OR TAF2C OR TAFII135 OR TAFII130 at 304-313 and may interact with Sequence 1523 in this patent.
GGSAGAAPAP

SEQ ID NO: 1525 - protein, 10 aa, Homo Sapiens
  sequence located in CACNA1S OR CACNL1A3 OR CACH1 OR CACN1 at 258-267 and may interact with Sequence 1526 in this patent.
GSECRGGWPG

SEQ ID NO: 1526 - protein, 10 aa, Homo Sapiens
  sequence located in TAF2G OR TAFII31 at 155-164 and may interact with Sequence 1525 in this patent.
SRPSTPTLGT

SEQ ID NO: 1527 - protein, 10 aa, Homo Sapiens
  sequence located in CACNA1S OR CACNL1A3 OR CACH1 OR CACN1 at 246-255 and may interact with Sequence 1528 in this patent.
ARTGSGRRCT

SEQ ID NO: 1528 - protein, 10 aa, Homo Sapiens
  sequence located in TAF2H OR TAFII30 at 51-60 and may interact with Sequence 1527 in this patent.
GPGAGAAAGG

SEQ ID NO: 1529 - protein, 10 aa, Homo Sapiens
  sequence located in CACNA1S OR CACNL1A3 OR CACH1 OR CACN1 at 245-254 and may interact with Sequence 1530 in this patent.
CARTGSGRRC

SEQ ID NO: 1530 - protein, 10 aa, Homo Sapiens
  sequence located in TAF2H OR TAFII30 at 50-59 and may interact with Sequence 1529 in this patent.
GGPGAGAAAG

SEQ ID NO: 1531 - protein, 10 aa, Homo Sapiens
  sequence located in CACNA1S OR CACNL1A3 OR CACH1 OR CACN1 at 1696-1705 and may interact with Sequence 1532 in this patent.
TPATRGRALG

SEQ ID NO: 1532 - protein, 10 aa, Homo Sapiens
  sequence located in TEAD4 OR TEF3 OR RTEF1 OR TCF13L1 at 12-21 and may interact with Sequence 1531 in this patent.
PEGSTASGGS

SEQ ID NO: 1533 - protein, 10 aa, Homo Sapiens
  sequence located in CACNA1S OR CACNL1A3 OR CACH1 OR CACN1 at 245-254 and may interact with Sequence 1534 in this patent.
CARTGSGRRC

SEQ ID NO: 1534 - protein, 10 aa, Homo Sapiens
  sequence located in TNFSF9 at 60-69 and may interact with Sequence 1533 in this patent.
ASPGSAASPR

SEQ ID NO: 1535 - protein, 10 aa, Homo Sapiens
  sequence located in CACNA1S OR CACNL1A3 OR CACH1 OR CACN1 at 244-253 and may interact with Sequence 1536 in this patent.
PCARTGSGRR

SEQ ID NO: 1536 - protein, 10 aa, Homo Sapiens
  sequence located in TNFSF9 at 59-68 and may interact with Sequence 1535 in this patent.
RASPGSAASP

SEQ ID NO: 1537 - protein, 10 aa, Homo Sapiens
  sequence located in CACNA1S OR CACNL1A3 OR CACH1 OR CACN1 at 244-253 and may interact with Sequence 1538 in this patent.
PCARTGSGRR

SEQ ID NO: 1538 - protein, 10 aa, Homo Sapiens
  sequence located in TNFSF9 at 57-66 and may interact with Sequence 1537 in this patent.
GARASPGSAA

SEQ ID NO: 1539 - protein, 10 aa, Homo Sapiens
  sequence located in CACNA1S OR CACNL1A3 OR CACH1 OR CACN1 at 243-252 and may interact with Sequence 1540 in this patent.
SPCARTGSGR

SEQ ID NO: 1540 - protein, 10 aa, Homo Sapiens
  sequence located in TNFSF9 at 58-67 and may interact with Sequence 1539 in this patent.
ARASPGSAAS

SEQ ID NO: 1541 - protein, 10 aa, Homo Sapiens
  sequence located in CACNA1S OR CACNL1A3 OR CACH1 OR CACN1 at 242-251 and may interact with Sequence 1542 in this patent.
PSPCARTGSG

SEQ ID NO: 1542 - protein, 10 aa, Homo Sapiens
  sequence located in TNFSF9 at 57-66 and may interact with Sequence 1541 in this patent.
GARASPGSAA

SEQ ID NO: 1543 - protein, 10 aa, Homo Sapiens
  sequence located in CACNA1S OR CACNL1A3 OR CACH1 OR CACN1 at 245-254 and may interact with Sequence 1544 in this patent.
CARTGSGRRC

SEQ ID NO: 1544 - protein, 10 aa, Homo Sapiens
  sequence located in USP4 OR UNP OR UNPH at 709-718 and may interact with Sequence 1543 in this patent.
GSSGPGSTSA

SEQ ID NO: 1545 - protein, 10 aa, Homo Sapiens
  sequence located in CACNA1S OR CACNL1A3 OR CACH1 OR CACN1 at 1313-1322 and may interact with Sequence 1546 in this patent.
VLLLFRCATG

SEQ ID NO: 1546 - protein, 10 aa, Homo Sapiens
  sequence located in UBE3A OR E6AP at 168-177 and may interact with Sequence 1545 in this patent.
DEKEKAACSA

SEQ ID NO: 1547 - protein, 10 aa, Homo Sapiens
  sequence located in CACNA1S OR CACNL1A3 OR CACH1 OR CACN1 at 245-254 and may interact with Sequence 1548 in this patent.
CARTGSGRRC

SEQ ID NO: 1548 - protein, 10 aa, Homo Sapiens
  sequence located in UGALT OR UGTL OR UGT at 8-17 and may interact with Sequence 1547 in this patent.
GSTAAPGPGA

SEQ ID NO: 1549 - protein, 10 aa, Homo Sapiens
  sequence located in CACNA1S OR CACNL1A3 OR CACH1 OR CACN1 at 246-255 and may interact with Sequence 1550 in this patent.
ARTGSGRRCT

SEQ ID NO: 1550 - protein, 10 aa, Homo Sapiens
  sequence located in UGALT OR UGTL OR UGT at 350-359 and may interact with Sequence 1549 in this patent.
SASASASGPC

SEQ ID NO: 1551 - protein, 10 aa, Homo Sapiens
  sequence located in CACNA1S OR CACNL1A3 OR CACH1 OR CACN1 at 246-255 and may interact with Sequence 1552 in this patent.
ARTGSGRRCT

SEQ ID NO: 1552 - protein, 10 aa, Homo Sapiens
  sequence located in UGALT OR UGTL OR UGT at 7-16 and may interact with Sequence 1551 in this patent.
GGSTAAPGPG

SEQ ID NO: 1553 - protein, 10 aa, Homo Sapiens
  sequence located in CACNA1S OR CACNL1A3 OR CACH1 OR CACN1 at 244-253 and may interact with Sequence 1554 in this patent.
PCARTGSGRR

SEQ ID NO: 1554 - protein, 10 aa, Homo Sapiens
  sequence located in Unknown at 531-540 and may interact with Sequence 1553 in this patent.
GRSPRPGSSA

SEQ ID NO: 1555 - protein, 10 aa, Homo Sapiens
  sequence located in CACNA1S OR CACNL1A3 OR CACH1 OR CACN1 at 243-252 and may interact with Sequence 1556 in this patent.
SPCARTGSGR

SEQ ID NO: 1556 - protein, 10 aa, Homo Sapiens
  sequence located in Unknown at 530-539 and may interact with Sequence 1555 in this patent.
GGRSPRPGSS

SEQ ID NO: 1557 - protein, 10 aa, Homo Sapiens
  sequence located in CACNA1S OR CACNL1A3 OR CACH1 OR CACN1 at 242-251 and may interact with Sequence 1558 in this patent.
PSPCARTGSG

SEQ ID NO: 1558 - protein, 10 aa, Homo Sapiens
  sequence located in Unknown at 529-538 and may interact with Sequence 1557 in this patent.
RGGRSPRPGS

SEQ ID NO: 1559 - protein, 10 aa, Homo Sapiens
  sequence located in CACNA1S OR CACNL1A3 OR CACH1 OR CACN1 at 245-254 and may interact with Sequence 1560 in this patent.
CARTGSGRRC

SEQ ID NO: 1560 - protein, 10 aa, Homo Sapiens
  sequence located in VIM at 18-27 and may interact with Sequence 1559 in this patent.
GTASRPSSSR

SEQ ID NO: 1561 - protein, 10 aa, Homo Sapiens
  sequence located in CACNA1S OR CACNL1A3 OR CACH1 OR CACN1 at 1770-1779 and may interact with Sequence 1562 in this patent.
RSTRENTSRC

SEQ ID NO: 1562 - protein, 10 aa, Homo Sapiens
  sequence located in VCL at 110-119 and may interact with Sequence 1561 in this patent.
GSRGILSGTS

SEQ ID NO: 1563 - protein, 10 aa, Homo Sapiens
  sequence located in CACNA1S OR CACNL1A3 OR CACH1 OR CACN1 at 259-268 and may interact with Sequence 1564 in this patent.
SECRGGWPGP

SEQ ID NO: 1564 - protein, 10 aa, Homo Sapiens
  sequence located in WNT10B at 6-15 and may interact with Sequence 1563 in this patent.
RPRPPPSGLA

SEQ ID NO: 1565 - protein, 10 aa, Homo Sapiens
  sequence located in CACNA1S OR CACNL1A3 OR CACH1 OR CACN1 at 884-893 and may interact with Sequence 1566 in this patent.
GLESSAISVV

SEQ ID NO: 1566 - protein, 10 aa, Homo Sapiens
  sequence located in WNT10B at 288-297 and may interact with Sequence 1565 in this patent.
HNRNSGAFQP

SEQ ID NO: 1567 - protein, 10 aa, Homo Sapiens
  sequence located in CACNA1S OR CACNL1A3 OR CACH1 OR CACN1 at 246-255 and may interact with Sequence 1568 in this patent.
ARTGSGRRCT

SEQ ID NO: 1568 - protein, 10 aa, Homo Sapiens
  sequence located in XE169 OR SMCX at 1177-1186 and may interact with Sequence 1567 in this patent.
SSSTASSTTS

SEQ ID NO: 1569 - protein, 10 aa, Homo Sapiens
  sequence located in CACNA1S OR CACNL1A3 OR CACH1 OR CACN1 at 245-254 and may interact with Sequence 1570 in this patent.
CARTGSGRRC

SEQ ID NO: 1570 - protein, 10 aa, Homo Sapiens
  sequence located in XE169 OR SMCX at 1176-1185 and may interact with Sequence 1569 in this patent.
ASSSTASSTT

SEQ ID NO: 1571 - protein, 10 aa, Homo Sapiens
  sequence located in CACNA1S OR CACNL1A3 OR CACH1 OR CACN1 at 246-255 and may interact with Sequence 1572 in this patent.
ARTGSGRRCT

SEQ ID NO: 1572 - protein, 10 aa, Homo Sapiens
  sequence located in XG OR PBDX at 100-109 and may interact with Sequence 1571 in this patent.
RPRPRPPAGG

SEQ ID NO: 1573 - protein, 10 aa, Homo Sapiens
  sequence located in CACNA1S OR CACNL1A3 OR CACH1 OR CACN1 at 244-253 and may interact with Sequence 1574 in this patent.
PCARTGSGRR

SEQ ID NO: 1574 - protein, 10 aa, Homo Sapiens
  sequence located in SLC16A2 OR XPCT at 35-44 and may interact with Sequence 1573 in this patent.
GGGSGSGSSS

SEQ ID NO: 1575 - protein, 10 aa, Homo Sapiens
  sequence located in CACNA1S OR CACNL1A3 OR CACH1 OR CACN1 at 1776-1785 and may interact with Sequence 1576 in this patent.
TSRCSAPATA

SEQ ID NO: 1576 - protein, 10 aa, Homo Sapiens
  sequence located in KIAA0050 at 529-538 and may interact with Sequence 1575 in this patent.
RRGGRGRPRG

SEQ ID NO: 1577 - protein, 10 aa, Homo Sapiens
  sequence located in CACNA1S OR CACNL1A3 OR CACH1 OR CACN1 at 804-813 and may interact with Sequence 1578 in this patent.
FILLFILLSS

SEQ ID NO: 1578 - protein, 10 aa, Homo Sapiens
  sequence located in KIAA0052 at 26-35 and may interact with Sequence 1577 in this patent.
GTKKDKEKDK

SEQ ID NO: 1579 - protein, 10 aa, Homo Sapiens
  sequence located in CACNA1S OR CACNL1A3 OR CACH1 OR CACN1 at 242-251 and may interact with Sequence 1580 in this patent.
PSPCARTGSG

SEQ ID NO: 1580 - protein, 10 aa, Homo Sapiens
  sequence located in KIAA0064 at 333-342 and may interact with Sequence 1579 in this patent.
STSSPGRGRG

SEQ ID NO: 1581 - protein, 10 aa, Homo Sapiens
  sequence located in CACNA1S OR CACNL1A3 OR CACH1 OR CACN1 at 1776-1785 and may interact with Sequence 1582 in this patent.
TSRCSAPATA

SEQ ID NO: 1582 - protein, 10 aa, Homo Sapiens
  sequence located in KIAA0144 at 177-186 and may interact with Sequence 1581 in this patent.
RGRGRGGSGR

SEQ ID NO: 1583 - protein, 10 aa, Homo Sapiens
  sequence located in CACNA1S OR CACNL1A3 OR CACH1 OR CACN1 at 245-254 and may interact with Sequence 1584 in this patent.
CARTGSGRRC

SEQ ID NO: 1584 - protein, 10 aa, Homo Sapiens
  sequence located in KIAA0174 at 335-344 and may interact with Sequence 1583 in this patent.
TASAGASTSA

SEQ ID NO: 1585 - protein, 10 aa, Homo Sapiens
  sequence located in CACNA1S OR CACNL1A3 OR CACH1 OR CACN1 at 1776-1785 and may interact with Sequence 1586 in this patent.
TSRCSAPATA

SEQ ID NO: 1586 - protein, 10 aa, Homo Sapiens
  sequence located in KIAA0174 at 207-216 and may interact with Sequence 1585 in this patent.
GGPGRGGSGG

SEQ ID NO: 1587 - protein, 10 aa, Homo Sapiens
  sequence located in CACNA1S OR CACNL1A3 OR CACH1 OR CACN1 at 1696-1705 and may interact with Sequence 1588 in this patent.
TPATRGRALG

SEQ ID NO: 1588 - protein, 10 aa, Homo Sapiens
  sequence located in KIAA0218 at 39-48 and may interact with Sequence 1587 in this patent.
AQRSASRSGG

SEQ ID NO: 1589 - protein, 10 aa, Homo Sapiens
  sequence located in CACNA1S OR CACNL1A3 OR CACH1 OR CACN1 at 815-824 and may interact with Sequence 1590 in this patent.
ALAAEDPIRA

SEQ ID NO: 1590 - protein, 10 aa, Homo Sapiens
  sequence located in KIAA0218 at 98-107 and may interact with Sequence 1589 in this patent.
SKGCLIRNTR

SEQ ID NO: 1591 - protein, 10 aa, Homo Sapiens
  sequence located in CACNA1S OR CACNL1A3 OR CACH1 OR CACN1 at 244-253 and may interact with Sequence 1592 in this patent.
PCARTGSGRR

SEQ ID NO: 1592 - protein, 10 aa, Homo Sapiens
  sequence located in KIAA0411 at 403-412 and may interact with Sequence 1591 in this patent.
SASASSAGAG

SEQ ID NO: 1593 - protein, 10 aa, Homo Sapiens
  sequence located in CACNA1S OR CACNL1A3 OR CACH1 OR CACN1 at 753-762 and may interact with Sequence 1594 in this patent.
PLSPRPRPLA

SEQ ID NO: 1594 - protein, 10 aa, Homo Sapiens
  sequence located in ZNF74 at 165-174 and may interact with Sequence 1593 in this patent.
RQRGAGAGEG

SEQ ID NO: 1595 - protein, 10 aa, Homo Sapiens
  sequence located in CCKAR OR CCKRA at 114-123 and may interact with Sequence 1596 in this patent.
CKTTTYFMGT

SEQ ID NO: 1596 - protein, 10 aa, Homo Sapiens
  sequence located in CD1E at 272-281 and may interact with Sequence 1595 in this patent.
GLSCRVKHSS

SEQ ID NO: 1597 - protein, 10 aa, Homo Sapiens
  sequence located in CCKAR OR CCKRA at 406-415 and may interact with Sequence 1598 in this patent.
GGTTGASLSR

SEQ ID NO: 1598 - protein, 10 aa, Homo Sapiens
  sequence located in CDSN at 121-130 and may interact with Sequence 1597 in this patent.
TPSSPGAQRP

SEQ ID NO: 1599 - protein, 10 aa, Homo Sapiens
  sequence located in CCKAR OR CCKRA at 246-255 and may interact with Sequence 1600 in this patent.
QKKSAKERKP

SEQ ID NO: 1600 - protein, 10 aa, Homo Sapiens
  sequence located in SLC7A2 OR ATRC2 at 174-183 and may interact with Sequence 1599 in this patent.
LLLAGLLSFG

SEQ ID NO: 1601 - protein, 10 aa, Homo Sapiens
  sequence located in CCKAR OR CCKRA at 241-250 and may interact with Sequence 1602 in this patent.
KFEASQKKSA

SEQ ID NO: 1602 - protein, 10 aa, Homo Sapiens
  sequence located in POLE2 OR DPE2 at 14-23 and may interact with Sequence 1601 in this patent.
FKLRGLLLRG

SEQ ID NO: 1603 - protein, 10 aa, Homo Sapiens
  sequence located in CCKAR OR CCKRA at 284-293 and may interact with Sequence 1604 in this patent.
QLSTGSSSRA

SEQ ID NO: 1604 - protein, 10 aa, Homo Sapiens
  sequence located in POLG OR MDP1 at 779-788 and may interact with Sequence 1603 in this patent.
LQAGPGGASG

SEQ ID NO: 1605 - protein, 10 aa, Homo Sapiens
  sequence located in CCKAR OR CCKRA at 283-292 and may interact with Sequence 1606 in this patent.
RQLSTGSSSR

SEQ ID NO: 1606 - protein, 10 aa, Homo Sapiens
  sequence located in POLG OR MDP1 at 778-787 and may interact with Sequence 1605 in this patent.
TLQAGPGGAS

SEQ ID NO: 1607 - protein, 10 aa, Homo Sapiens
  sequence located in CCKAR OR CCKRA at 288-297 and may interact with Sequence 1608 in this patent.
GSSSRANRIR

SEQ ID NO: 1608 - protein, 10 aa, Homo Sapiens
  sequence located in EPHB2 OR EPTH3 OR ERK OR DRT OR HEK5 at 221-230 and may interact with Sequence 1607 in this patent.
AARGSCIANA

SEQ ID NO: 1609 - protein, 10 aa, Homo Sapiens
  sequence located in CCKAR OR CCKRA at 328-337 and may interact with Sequence 1610 in this patent.
PIFSANAWRA

SEQ ID NO: 1610 - protein, 10 aa, Homo Sapiens
  sequence located in E4TF1A OR GABPA at 298-307 and may interact with Sequence 1609 in this patent.
RAPRISGEDR

SEQ ID NO: 1611 - protein, 10 aa, Homo Sapiens
  sequence located in CCKAR OR CCKRA at 286-295 and may interact with Sequence 1612 in this patent.
STGSSSRANR

SEQ ID NO: 1612 - protein, 10 aa, Homo Sapiens
  sequence located in TCF9 at 109-118 and may interact with Sequence 1611 in this patent.
AGSGRAPGVP

SEQ ID NO: 1613 - protein, 10 aa, Homo Sapiens
  sequence located in CCKAR OR CCKRA at 286-295 and may interact with Sequence 1614 in this patent.
STGSSSRANR

SEQ ID NO: 1614 - protein, 10 aa, Homo Sapiens
  sequence located in GSN at 24-33 and may interact with Sequence 1613 in this patent.
PVRAATASRG

SEQ ID NO: 1615 - protein, 10 aa, Homo Sapiens
  sequence located in CCKAR OR CCKRA at 340-349 and may interact with Sequence 1616 in this patent.
TASAERRLSG

SEQ ID NO: 1616 - protein, 10 aa, Homo Sapiens
  sequence located in Unknown at 149-158 and may interact with Sequence 1615 in this patent.
GGAGLPAQAA

SEQ ID NO: 1617 - protein, 10 aa, Homo Sapiens
  sequence located in CCKAR OR CCKRA at 406-415 and may interact with Sequence 1618 in this patent.
GGTTGASLSR

SEQ ID NO: 1618 - protein, 10 aa, Homo Sapiens
  sequence located in HTLF at 220-229 and may interact with Sequence 1617 in this patent.
AAQRCASRSS

SEQ ID NO: 1619 - protein, 10 aa, Homo Sapiens
  sequence located in CCKAR OR CCKRA at 405-414 and may interact with Sequence 1620 in this patent.
EGGTTGASLS

SEQ ID NO: 1620 - protein, 10 aa, Homo Sapiens
  sequence located in SPN OR CD43 at 333-342 and may interact with Sequence 1619 in this patent.
GEGSSRRPTL

SEQ ID NO: 1621 - protein, 10 aa, Homo Sapiens
  sequence located in CCKAR OR CCKRA at 253-262 and may interact with Sequence 1622 in this patent.
RKPSTTSSGK

SEQ ID NO: 1622 - protein, 10 aa, Homo Sapiens
  sequence located in MGA OR MGAML at 331-340 and may interact with Sequence 1621 in this patent.
TFRARSRAPF

SEQ ID NO: 1623 - protein, 10 aa, Homo Sapiens
  sequence located in CCKAR OR CCKRA at 281-290 and may interact with Sequence 1624 in this patent.
ELRQLSTGSS

SEQ ID NO: 1624 - protein, 10 aa, Homo Sapiens
  sequence located in MYF5 at 103-112 and may interact with Sequence 1623 in this patent.
FETLKRCTTT

SEQ ID NO: 1625 - protein, 10 aa, Homo Sapiens
  sequence located in CCKAR OR CCKRA at 340-349 and may interact with Sequence 1626 in this patent.
TASAERRLSG

SEQ ID NO: 1626 - protein, 10 aa, Homo Sapiens
  sequence located in MYH10 at 703-712 and may interact with Sequence 1625 in this patent.
SGKTTLSASG

SEQ ID NO: 1627 - protein, 10 aa, Homo Sapiens
  sequence located in CCKAR OR CCKRA at 60-69 and may interact with Sequence 1628 in this patent.
TLVITVLIRN

SEQ ID NO: 1628 - protein, 10 aa, Homo Sapiens
  sequence located in NELL2 OR NRP2 at 101-110 and may interact with Sequence 1627 in this patent.
GQHNCDENAI

SEQ ID NO: 1629 - protein, 10 aa, Homo Sapiens
  sequence located in CCKAR OR CCKRA at 405-414 and may interact with Sequence 1630 in this patent.
EGGTTGASLS

SEQ ID NO: 1630 - protein, 10 aa, Homo Sapiens
  sequence located in SLC12A2 OR NKCC1 at 535-544 and may interact with Sequence 1629 in this patent.
RERSSRSSSL

SEQ ID NO: 1631 - protein, 10 aa, Homo Sapiens
  sequence located in CCKAR OR CCKRA at 408-417 and may interact with Sequence 1632 in this patent.
TTGASLSRFS

SEQ ID NO: 1632 - protein, 10 aa, Homo Sapiens
  sequence located in PRSS8 at 26-35 and may interact with Sequence 1631 in this patent.
SGTGAEGAEA

SEQ ID NO: 1633 - protein, 10 aa, Homo Sapiens
  sequence located in CCKAR OR CCKRA at 409-418 and may interact with Sequence 1634 in this patent.
TGASLSRFSY

SEQ ID NO: 1634 - protein, 10 aa, Homo Sapiens
  sequence located in RBL2 OR RB2 at 315-324 and may interact with Sequence 1633 in this patent.
GSGTETAERV

SEQ ID NO: 1635 - protein, 10 aa, Homo Sapiens
  sequence located in CCKAR OR CCKRA at 405-414 and may interact with Sequence 1636 in this patent.
EGGTTGASLS

SEQ ID NO: 1636 - protein, 10 aa, Homo Sapiens
  sequence located in RET at 555-564 and may interact with Sequence 1635 in this patent.
FSTCSPSTKT

SEQ ID NO: 1637 - protein, 10 aa, Homo Sapiens
  sequence located in CCKAR OR CCKRA at 286-295 and may interact with Sequence 1638 in this patent.
STGSSSRANR

SEQ ID NO: 1638 - protein, 10 aa, Homo Sapiens
  sequence located in RFX5 at 10-19 and may interact with Sequence 1637 in this patent.
AGPGAASGVP

SEQ ID NO: 1639 - protein, 10 aa, Homo Sapiens
  sequence located in CCKAR OR CCKRA at 285-294 and may interact with Sequence 1640 in this patent.
LSTGSSSRAN

SEQ ID NO: 1640 - protein, 10 aa, Homo Sapiens
  sequence located in SFRS8 OR SWAP at 548-557 and may interact with Sequence 1639 in this patent.
VGARAGSGGK

SEQ ID NO: 1641 - protein, 10 aa, Homo Sapiens
  sequence located in CCKAR OR CCKRA at 286-295 and may interact with Sequence 1642 in this patent.
STGSSSRANR

SEQ ID NO: 1642 - protein, 10 aa, Homo Sapiens
  sequence located in SLC5A1 OR SGLT1 at 88-97 and may interact with Sequence 1641 in this patent.
AGTGAASGIA

SEQ ID NO: 1643 - protein, 10 aa, Homo Sapiens
  sequence located in CCKAR OR CCKRA at 128-137 and may interact with Sequence 1644 in this patent.
STFNLVAISL

SEQ ID NO: 1644 - protein, 10 aa, Homo Sapiens
  sequence located in Unknown at 1401-1410 and may interact with Sequence 1643 in this patent.
QGNCDQVESR

SEQ ID NO: 1645 - protein, 10 aa, Homo Sapiens
  sequence located in CCKAR OR CCKRA at 129-138 and may interact with Sequence 1646 in this patent.
TFNLVAISLE

SEQ ID NO: 1646 - protein, 10 aa, Homo Sapiens
  sequence located in Unknown at 1400-1409 and may interact with Sequence 1645 in this patent.
FQGNCDQVES

SEQ ID NO: 1647 - protein, 10 aa, Homo Sapiens
  sequence located in CCKAR OR CCKRA at 213-222 and may interact with Sequence 1648 in this patent.
LLLILFLIPG

SEQ ID NO: 1648 - protein, 10 aa, Homo Sapiens
  sequence located in YARS at 295-304 and may interact with Sequence 1647 in this patent.
EEEDKEKDGA

SEQ ID NO: 1649 - protein, 10 aa, Homo Sapiens
  sequence located in CCKAR OR CCKRA at 286-295 and may interact with Sequence 1650 in this patent.
STGSSSRANR

SEQ ID NO: 1650 - protein, 10 aa, Homo Sapiens
  sequence located in TAF2J OR TAFII20 OR TAF15 at 348-357 and may interact with Sequence 1649 in this patent.
SVGPTAATGG

SEQ ID NO: 1651 - protein, 10 aa, Homo Sapiens
  sequence located in CCKAR OR CCKRA at 90-99 and may interact with Sequence 1652 in this patent.
LCLFCMPFNL

SEQ ID NO: 1652 - protein, 10 aa, Homo Sapiens
  sequence located in HXB at 312-321 and may interact with Sequence 1651 in this patent.
KREKTHGEVE

SEQ ID NO: 1653 - protein, 10 aa, Homo Sapiens
  sequence located in CCKAR OR CCKRA at 287-296 and may interact with Sequence 1654 in this patent.
TGSSSRANRI

SEQ ID NO: 1654 - protein, 10 aa, Homo Sapiens
  sequence located in UCP2 at 19-28 and may interact with Sequence 1653 in this patent.
GAGTAACIAD

SEQ ID NO: 1655 - protein, 10 aa, Homo Sapiens
  sequence located in CCKAR OR CCKRA at 387-396 and may interact with Sequence 1656 in this patent.
CCPNPGPPGA

SEQ ID NO: 1656 - protein, 10 aa, Homo Sapiens
  sequence located in KIAA0286 at 1-10 and may interact with Sequence 1655 in this patent.
GPWGSGVGGG

SEQ ID NO: 1657 - protein, 10 aa, Homo Sapiens
  sequence located in CCKAR OR CCKRA at 256-265 and may interact with Sequence 1658 in this patent.
STTSSGKYED

SEQ ID NO: 1658 - protein, 10 aa, Homo Sapiens
  sequence located in TJP1 OR ZO1 at 406-415 and may interact with Sequence 1657 in this patent.
ILVLTRRCRT

SEQ ID NO: 1659 - protein, 10 aa, Homo Sapiens
  sequence located in CXCR3 OR GPR9 at 209-218 and may interact with Sequence 1660 in this patent.
QVGRTALRVL

SEQ ID NO: 1660 - protein, 10 aa, Homo Sapiens
  sequence located in C4A AND C4B at 608-617 and may interact with Sequence 1659 in this patent.
LYAAGSKSHK

SEQ ID NO: 1661 - protein, 10 aa, Homo Sapiens
  sequence located in CXCR3 OR GPR9 at 78-87 and may interact with Sequence 1662 in this patent.
LLSRRTALSS

SEQ ID NO: 1662 - protein, 10 aa, Homo Sapiens
  sequence located in DDX16 OR DBP2 at 33-42 and may interact with Sequence 1661 in this patent.
TAQRCTSAEE

SEQ ID NO: 1663 - protein, 10 aa, Homo Sapiens
  sequence located in CXCR3 OR GPR9 at 79-88 and may interact with Sequence 1664 in this patent.
LSRRTALSST

SEQ ID NO: 1664 - protein, 10 aa, Homo Sapiens
  sequence located in DDX16 OR DBP2 at 32-41 and may interact with Sequence 1663 in this patent.
GTAQRCTSAE

SEQ ID NO: 1665 - protein, 10 aa, Homo Sapiens
  sequence located in CXCR3 OR GPR9 at 80-89 and may interact with Sequence 1666 in this patent.
SRRTALSSTD

SEQ ID NO: 1666 - protein, 10 aa, Homo Sapiens
  sequence located in DDX16 OR DBP2 at 31-40 and may interact with Sequence 1665 in this patent.
IGTAQRCTSA

SEQ ID NO: 1667 - protein, 10 aa, Homo Sapiens
  sequence located in CXCR3 OR GPR9 at 348-357 and may interact with Sequence 1668 in this patent.
PSSSRRDSSW

SEQ ID NO: 1668 - protein, 10 aa, Homo Sapiens
  sequence located in DRPLA at 238-247 and may interact with Sequence 1667 in this patent.
GGAASSVGGP

SEQ ID NO: 1669 - protein, 10 aa, Homo Sapiens
  sequence located in CXCR3 OR GPR9 at 31-40 and may interact with Sequence 1670 in this patent.
ENESDSCCTS

SEQ ID NO: 1670 - protein, 10 aa, Homo Sapiens
  sequence located in Unknown at 242-251 and may interact with Sequence 1669 in this patent.
GRGTTITLVL

SEQ ID NO: 1671 - protein, 10 aa, Homo Sapiens
  sequence located in CXCR3 OR GPR9 at 76-85 and may interact with Sequence 1672 in this patent.
AVLLSRRTAL

SEQ ID NO: 1672 - protein, 10 aa, Homo Sapiens
  sequence located in EPHA7 OR EHK3 OR HEK11 at 302-311 and may interact with Sequence 1671 in this patent.
SDKEGSSRCE

SEQ ID NO: 1673 - protein, 10 aa, Homo Sapiens
  sequence located in CXCR3 OR GPR9 at 346-355 and may interact with Sequence 1674 in this patent.
RQPSSSRRDS

SEQ ID NO: 1674 - protein, 10 aa, Homo Sapiens
  sequence located in Unknown at 245-254 and may interact with Sequence 1673 in this patent.
GISAATGGLA

SEQ ID NO: 1675 - protein, 10 aa, Homo Sapiens
  sequence located in CXCR3 OR GPR9 at 137-146 and may interact with Sequence 1676 in this patent.
AGALLLACIS

SEQ ID NO: 1676 - protein, 10 aa, Homo Sapiens
  sequence located in FBLN1 at 184-193 and may interact with Sequence 1675 in this patent.
GPCKQQCRDT

SEQ ID NO: 1677 - protein, 10 aa, Homo Sapiens
  sequence located in CXCR3 OR GPR9 at 137-146 and may interact with Sequence 1678 in this patent.
AGALLLACIS

SEQ ID NO: 1678 - protein, 10 aa, Homo Sapiens
  sequence located in FBLN1 at 184-193 and may interact with Sequence 1677 in this patent.
GPCKQQCRDT

SEQ ID NO: 1679 - protein, 10 aa, Homo Sapiens
  sequence located in CXCR3 OR GPR9 at 137-146 and may interact with Sequence 1680 in this patent.
AGALLLACIS

SEQ ID NO: 1680 - protein, 10 aa, Homo Sapiens
  sequence located in FBLN1 at 184-193 and may interact with Sequence 1679 in this patent.
GPCKQQCRDT

SEQ ID NO: 1681 - protein, 10 aa, Homo Sapiens
  sequence located in CXCR3 OR GPR9 at 239-248 and may interact with Sequence 1682 in this patent.
LAVLLVSRGQ

SEQ ID NO: 1682 - protein, 10 aa, Homo Sapiens
  sequence located in FER OR TYK3 at 37-46 and may interact with Sequence 1681 in this patent.
KSDKEYASTL

SEQ ID NO: 1683 - protein, 10 aa, Homo Sapiens
  sequence located in CXCR3 OR GPR9 at 221-230 and may interact with Sequence 1684 in this patent.
VAGFLLPLLV

SEQ ID NO: 1684 - protein, 10 aa, Homo Sapiens
  sequence located in GCDH at 155-164 and may interact with Sequence 1683 in this patent.
YGSEEQRQKY

SEQ ID NO: 1685 - protein, 10 aa, Homo Sapiens
  sequence located in CXCR3 OR GPR9 at 347-356 and may interact with Sequence 1686 in this patent.
QPSSSRRDSS

SEQ ID NO: 1686 - protein, 10 aa, Homo Sapiens
  sequence located in HD OR IT15 at 1795-1804 and may interact with Sequence 1685 in this patent.
RRITAAATRL

SEQ ID NO: 1687 - protein, 10 aa, Homo Sapiens
  sequence located in CXCR3 OR GPR9 at 255-264 and may interact with Sequence 1688 in this patent.
RLVVVVVVAF

SEQ ID NO: 1688 - protein, 10 aa, Homo Sapiens
  sequence located in MLL OR HRX OR ALL1 OR TRX1 OR HTRX at 1574-1583 and may interact with Sequence 1687 in this patent.
KCYDDDDYES

SEQ ID NO: 1689 - protein, 10 aa, Homo Sapiens
  sequence located in CXCR3 OR GPR9 at 11-20 and may interact with Sequence 1690 in this patent.
LNDAEVAALL

SEQ ID NO: 1690 - protein, 10 aa, Homo Sapiens
  sequence located in INHBA at 142-151 and may interact with Sequence 1689 in this patent.
KEGSDLSVVE

SEQ ID NO: 1691 - protein, 10 aa, Homo Sapiens
  sequence located in CXCR3 OR GPR9 at 120-129 and may interact with Sequence 1692 in this patent.
GSGLCKVAGA

SEQ ID NO: 1692 - protein, 10 aa, Homo Sapiens
  sequence located in SELE OR ELAM1 at 547-556 and may interact with Sequence 1691 in this patent.
SGPERLDCTR

SEQ ID NO: 1693 - protein, 10 aa, Homo Sapiens
  sequence located in CXCR3 OR GPR9 at 56-65 and may interact with Sequence 1694 in this patent.
LPALYSLLFL

SEQ ID NO: 1694 - protein, 10 aa, Homo Sapiens
  sequence located in LAMA2 OR LAMM at 1816-1825 and may interact with Sequence 1693 in this patent.
KKKEAVESGK

SEQ ID NO: 1695 - protein, 10 aa, Homo Sapiens
  sequence located in CXCR3 OR GPR9 at 57-66 and may interact with Sequence 1696 in this patent.
PALYSLLFLL

SEQ ID NO: 1696 - protein, 10 aa, Homo Sapiens
  sequence located in LAMA2 OR LAMM at 1815-1824 and may interact with Sequence 1695 in this patent.
EKKKEAVESG

SEQ ID NO: 1697 - protein, 10 aa, Homo Sapiens
  sequence located in CXCR3 OR GPR9 at 347-356 and may interact with Sequence 1698 in this patent.
QPSSSRRDSS

SEQ ID NO: 1698 - protein, 10 aa, Homo Sapiens
  sequence located in LOR OR LRN at 32-41 and may interact with Sequence 1697 in this patent.
LWGRGPAIGG

SEQ ID NO: 1699 - protein, 10 aa, Homo Sapiens
  sequence located in CXCR3 OR GPR9 at 346-355 and may interact with Sequence 1700 in this patent.
RQPSSSRRDS

SEQ ID NO: 1700 - protein, 10 aa, Homo Sapiens
  sequence located in LOR OR LRN at 31-40 and may interact with Sequence 1699 in this patent.
ALWGRGPAIG

SEQ ID NO: 1701 - protein, 10 aa, Homo Sapiens
  sequence located in CXCR3 OR GPR9 at 348-357 and may interact with Sequence 1702 in this patent.
PSSSRRDSSW

SEQ ID NO: 1702 - protein, 10 aa, Homo Sapiens
  sequence located in MCM2 OR CDCL1 OR BM28 at 363-372 and may interact with Sequence 1701 in this patent.
PRAIPTTGRG

SEQ ID NO: 1703 - protein, 10 aa, Homo Sapiens
  sequence located in CXCR3 OR GPR9 at 349-358 and may interact with Sequence 1704 in this patent.
SSSRRDSSWS

SEQ ID NO: 1704 - protein, 10 aa, Homo Sapiens
  sequence located in MCM2 OR CDCL1 OR BM28 at 362-371 and may interact with Sequence 1703 in this patent.
APRAIPTTGR

SEQ ID NO: 1705 - protein, 10 aa, Homo Sapiens
  sequence located in CXCR3 OR GPR9 at 79-88 and may interact with Sequence 1706 in this patent.
LSRRTALSST

SEQ ID NO: 1706 - protein, 10 aa, Homo Sapiens
  sequence located in CMOAT OR MRP2 OR CMRP at 54-63 and may interact with Sequence 1705 in this patent.
SRTKRSSTTK

SEQ ID NO: 1707 - protein, 10 aa, Homo Sapiens
  sequence located in CXCR3 OR GPR9 at 34-43 and may interact with Sequence 1708 in this patent.
SDSCCTSPPC

SEQ ID NO: 1708 - protein, 10 aa, Homo Sapiens
  sequence located in NMB at 65-74 and may interact with Sequence 1707 in this patent.
GVARGGAGGG

SEQ ID NO: 1709 - protein, 10 aa, Homo Sapiens
  sequence located in CXCR3 OR GPR9 at 61-70 and may interact with Sequence 1710 in this patent.
SLLFLLGLLG

SEQ ID NO: 1710 - protein, 10 aa, Homo Sapiens
  sequence located in NEFL OR NFL at 502-511 and may interact with Sequence 1709 in this patent.
SEEAKEEEEG

SEQ ID NO: 1711 - protein, 10 aa, Homo Sapiens
  sequence located in CXCR3 OR GPR9 at 359-368 and may interact with Sequence 1712 in this patent.
ETSEASYSGL

SEQ ID NO: 1712 - protein, 10 aa, Homo Sapiens
  sequence located in NDUFS2 at 7-16 and may interact with Sequence 1711 in this patent.
LCGFRGVAAQ

SEQ ID NO: 1713 - protein, 10 aa, Homo Sapiens
  sequence located in CXCR3 OR GPR9 at 358-367 and may interact with Sequence 1714 in this patent.
SETSEASYSG

SEQ ID NO: 1714 - protein, 10 aa, Homo Sapiens
  sequence located in NDUFS2 at 6-15 and may interact with Sequence 1713 in this patent.
ALCGFRGVAA

SEQ ID NO: 1715 - protein, 10 aa, Homo Sapiens
  sequence located in CXCR3 OR GPR9 at 350-359 and may interact with Sequence 1716 in this patent.
SSRRDSSWSE

SEQ ID NO: 1716 - protein, 10 aa, Homo Sapiens
  sequence located in PITX3 OR PTX3 at 225-234 and may interact with Sequence 1715 in this patent.
LAPAAVSSGA

SEQ ID NO: 1717 - protein, 10 aa, Homo Sapiens
  sequence located in CXCR3 OR GPR9 at 351-360 and may interact with Sequence 1718 in this patent.
SRRDSSWSET

SEQ ID NO: 1718 - protein, 10 aa, Homo Sapiens
  sequence located in PITX3 OR PTX3 at 224-233 and may interact with Sequence 1717 in this patent.
GLAPAAVSSG

SEQ ID NO: 1719 - protein, 10 aa, Homo Sapiens
  sequence located in CXCR3 OR GPR9 at 35-44 and may interact with Sequence 1720 in this patent.
DSCCTSPPCP

SEQ ID NO: 1720 - protein, 10 aa, Homo Sapiens
  sequence located in RPS29 at 33-42 and may interact with Sequence 1719 in this patent.
IRGRGRGRGR

SEQ ID NO: 1721 - protein, 10 aa, Homo Sapiens
  sequence located in CXCR3 OR GPR9 at 34-43 and may interact with Sequence 1722 in this patent.
SDSCCTSPPC

SEQ ID NO: 1722 - protein, 10 aa, Homo Sapiens
  sequence located in RPS29 at 32-41 and may interact with Sequence 1721 in this patent.
GIRGRGRGRG

SEQ ID NO: 1723 - protein, 10 aa, Homo Sapiens
  sequence located in CXCR3 OR GPR9 at 35-44 and may interact with Sequence 1724 in this patent.
DSCCTSPPCP

SEQ ID NO: 1724 - protein, 10 aa, Homo Sapiens
  sequence located in TIE1 OR TIE at 106-115 and may interact with Sequence 1723 in this patent.
VGGAGARRTR

SEQ ID NO: 1725 - protein, 10 aa, Homo Sapiens
  sequence located in CXCR3 OR GPR9 at 296-305 and may interact with Sequence 1726 in this patent.
VDVAKSVTSG

SEQ ID NO: 1726 - protein, 10 aa, Homo Sapiens
  sequence located in TKT2 OR TKR at 98-107 and may interact with Sequence 1725 in this patent.
DVNRLGHSGA

SEQ ID NO: 1727 - protein, 10 aa, Homo Sapiens
  sequence located in CXCR3 OR GPR9 at 76-85 and may interact with Sequence 1728 in this patent.
AVLLSRRTAL

SEQ ID NO: 1728 - protein, 10 aa, Homo Sapiens
  sequence located in TPP2 at 1925-1934 and may interact with Sequence 1727 in this patent.
SDQQTTTSSQ

SEQ ID NO: 1729 - protein, 10 aa, Homo Sapiens
  sequence located in CXCR3 OR GPR9 at 348-357 and may interact with Sequence 1730 in this patent.
PSSSRRDSSW

SEQ ID NO: 1730 - protein, 10 aa, Homo Sapiens
  sequence located in XRCC1 at 136-145 and may interact with Sequence 1729 in this patent.
PRTVSSTTAR

SEQ ID NO: 1731 - protein, 10 aa, Homo Sapiens
  sequence located in CXCR3 OR GPR9 at 35-44 and may interact with Sequence 1732 in this patent.
DSCCTSPPCP

SEQ ID NO: 1732 - protein, 10 aa, Homo Sapiens
  sequence located in KIAA0050 at 526-535 and may interact with Sequence 1731 in this patent.
IRGRRGGRGR

SEQ ID NO: 1733 - protein, 10 aa, Homo Sapiens
  sequence located in CXCR3 OR GPR9 at 345-354 and may interact with Sequence 1734 in this patent.
QRQPSSSRRD

SEQ ID NO: 1734 - protein, 10 aa, Homo Sapiens
  sequence located in KIAA0141 at 52-61 and may interact with Sequence 1733 in this patent.
LSLGAAASAV

SEQ ID NO: 1735 - protein, 10 aa, Homo Sapiens
  sequence located in CD3Z OR T3Z OR TCRZ at 28-37 and may interact with Sequence 1736 in this patent.
DPKLCYLLDG

SEQ ID NO: 1736 - protein, 10 aa, Homo Sapiens
  sequence located in C4A AND C4B at 1533-1542 and may interact with Sequence 1735 in this patent.
VGFEAVQEVP

SEQ ID NO: 1737 - protein, 10 aa, Homo Sapiens
  sequence located in CD3Z OR T3Z OR TCRZ at 128-137 and may interact with Sequence 1738 in this patent.
KGERRRGKGH

SEQ ID NO: 1738 - protein, 10 aa, Homo Sapiens
  sequence located in IGHE at 53-62 and may interact with Sequence 1737 in this patent.
MTLPATTLTL

SEQ ID NO: 1739 - protein, 10 aa, Homo Sapiens
  sequence located in CD3Z OR T3Z OR TCRZ at 54-63 and may interact with Sequence 1740 in this patent.
KFSRSAEPPA

SEQ ID NO: 1740 - protein, 10 aa, Homo Sapiens
  sequence located in NOP56 at 110-119 and may interact with Sequence 1739 in this patent.
LERAACLRRC

SEQ ID NO: 1741 - protein, 10 aa, Homo Sapiens
  sequence located in CD3Z OR T3Z OR TCRZ at 136-145 and may interact with Sequence 1742 in this patent.
GHDGLYQGLS

SEQ ID NO: 1742 - protein, 10 aa, Homo Sapiens
  sequence located in POU2AF1 OR OBF1 at 31-40 and may interact with Sequence 1741 in this patent.
TKTLIKTIVT

SEQ ID NO: 1743 - protein, 10 aa, Homo Sapiens
  sequence located in CD3Z OR T3Z OR TCRZ at 54-63 and may interact with Sequence 1744 in this patent.
KFSRSAEPPA

SEQ ID NO: 1744 - protein, 10 aa, Homo Sapiens
  sequence located in RPS23 at 4-13 and may interact with Sequence 1743 in this patent.
CRGLRTARKL

SEQ ID NO: 1745 - protein, 10 aa, Homo Sapiens
  sequence located in CD3Z OR T3Z OR TCRZ at 8-17 and may interact with Sequence 1746 in this patent.
TAAILQAQLP

SEQ ID NO: 1746 - protein, 10 aa, Homo Sapiens
  sequence located in GTF2E2 OR TF2E2 at 99-108 and may interact with Sequence 1745 in this patent.
SSSDKLSLEG

SEQ ID NO: 1747 - protein, 10 aa, Homo Sapiens
  sequence located in CD3Z OR T3Z OR TCRZ at 7-16 and may interact with Sequence 1748 in this patent.
FTAAILQAQL

SEQ ID NO: 1748 - protein, 10 aa, Homo Sapiens
  sequence located in GTF2E2 OR TF2E2 at 98-107 and may interact with Sequence 1747 in this patent.
ESSSDKLSLE

SEQ ID NO: 1749 - protein, 10 aa, Homo Sapiens
  sequence located in CD72 at 85-94 and may interact with Sequence 1750 in this patent.
ILPCRTTCLR

SEQ ID NO: 1750 - protein, 10 aa, Homo Sapiens
  sequence located in PDE9A at 92-101 and may interact with Sequence 1749 in this patent.
DKRTTSRGQS

SEQ ID NO: 1751 - protein, 10 aa, Homo Sapiens
  sequence located in CD72 at 322-331 and may interact with Sequence 1752 in this patent.
SSKCNKVHKT

SEQ ID NO: 1752 - protein, 10 aa, Homo Sapiens
  sequence located in CYP51 at 39-48 and may interact with Sequence 1751 in this patent.
SLVYLIRLAA

SEQ ID NO: 1753 - protein, 10 aa, Homo Sapiens
  sequence located in CD72 at 225-234 and may interact with Sequence 1754 in this patent.
TCGSADTCCP

SEQ ID NO: 1754 - protein, 10 aa, Homo Sapiens
  sequence located in EAAT5 at 412-421 and may interact with Sequence 1753 in this patent.
GTAASIGAAG

SEQ ID NO: 1755 - protein, 10 aa, Homo Sapiens
  sequence located in CD72 at 286-295 and may interact with Sequence 1756 in this patent.
SLLPNGGSGN

SEQ ID NO: 1756 - protein, 10 aa, Homo Sapiens
  sequence located in EXTL3 OR EXTR1 at 540-549 and may interact with Sequence 1755 in this patent.
IPAAPIREEA

SEQ ID NO: 1757 - protein, 10 aa, Homo Sapiens
  sequence located in CD72 at 336-345 and may interact with Sequence 1758 in this patent.
TLESESCRSS

SEQ ID NO: 1758 - protein, 10 aa, Homo Sapiens
  sequence located in GPC1 at 207-216 and may interact with Sequence 1757 in this patent.
RELRLRATRA

SEQ ID NO: 1759 - protein, 10 aa, Homo Sapiens
  sequence located in CD72 at 335-344 and may interact with Sequence 1760 in this patent.
WTLESESCRS

SEQ ID NO: 1760 - protein, 10 aa, Homo Sapiens
  sequence located in GPC1 at 206-215 and may interact with Sequence 1759 in this patent.
PRELRLRATR

SEQ ID NO: 1761 - protein, 10 aa, Homo Sapiens
  sequence located in CD72 at 316-325 and may interact with Sequence 1762 in this patent.
TRTYAQSSKC

SEQ ID NO: 1762 - protein, 10 aa, Homo Sapiens
  sequence located in GZMB OR CTLA1 OR GRB OR CSPB OR CGL1 at 12-21 and may interact with Sequence 1761 in this patent.
ALGALSVGSS

SEQ ID NO: 1763 - protein, 10 aa, Homo Sapiens
  sequence located in CD72 at 92-101 and may interact with Sequence 1764 in this patent.
CLRYLLLGLL

SEQ ID NO: 1764 - protein, 10 aa, Homo Sapiens
  sequence located in MLL OR HRX OR ALL1 OR TRX1 OR HTRX at 1264-1273 and may interact with Sequence 1763 in this patent.
RKPVEEKSEE

SEQ ID NO: 1765 - protein, 10 aa, Homo Sapiens
  sequence located in CD72 at 84-93 and may interact with Sequence 1766 in this patent.
RILPCRTTCL

SEQ ID NO: 1766 - protein, 10 aa, Homo Sapiens
  sequence located in ICAM2 at 463-472 and may interact with Sequence 1765 in this patent.
QASSSRGKYT

SEQ ID NO: 1767 - protein, 10 aa, Homo Sapiens
  sequence located in CD72 at 225-234 and may interact with Sequence 1768 in this patent.
TCGSADTCCP

SEQ ID NO: 1768 - protein, 10 aa, Homo Sapiens
  sequence located in IRS1 at 971-980 and may interact with Sequence 1767 in this patent.
GAASICRPTR

SEQ ID NO: 1769 - protein, 10 aa, Homo Sapiens
  sequence located in CD72 at 257-266 and may interact with Sequence 1770 in this patent.
SQKQCETLSS

SEQ ID NO: 1770 - protein, 10 aa, Homo Sapiens
  sequence located in ITIH4 OR IHRP OR PK120 at 853-862 and may interact with Sequence 1769 in this patent.
RGEGLRLLLR

SEQ ID NO: 1771 - protein, 10 aa, Homo Sapiens
  sequence located in CD72 at 226-235 and may interact with Sequence 1772 in this patent.
CGSADTCCPS

SEQ ID NO: 1772 - protein, 10 aa, Homo Sapiens
  sequence located in MAP1A at 2477-2486 and may interact with Sequence 1771 in this patent.
GGRRRVGGPG

SEQ ID NO: 1773 - protein, 10 aa, Homo Sapiens
  sequence located in CD72 at 93-102 and may interact with Sequence 1774 in this patent.
LRYLLLGLLL

SEQ ID NO: 1774 - protein, 10 aa, Homo Sapiens
  sequence located in MAP1B at 653-662 and may interact with Sequence 1773 in this patent.
KEKPKKEVAK

SEQ ID NO: 1775 - protein, 10 aa, Homo Sapiens
  sequence located in CD72 at 227-236 and may interact with Sequence 1776 in this patent.
GSADTCCPSG

SEQ ID NO: 1776 - protein, 10 aa, Homo Sapiens
  sequence located in GRM5 OR MGLUR5 at 971-980 and may interact with Sequence 1775 in this patent.
AGGVGATGGA

SEQ ID NO: 1777 - protein, 10 aa, Homo Sapiens
  sequence located in CD72 at 101-110 and may interact with Sequence 1778 in this patent.
LLTCLLLGVT

SEQ ID NO: 1778 - protein, 10 aa, Homo Sapiens
  sequence located in MTMR1 at 139-148 and may interact with Sequence 1777 in this patent.
CNSEQQRGKE

SEQ ID NO: 1779 - protein, 10 aa, Homo Sapiens
  sequence located in CD72 at 225-234 and may interact with Sequence 1780 in this patent.
TCGSADTCCP

SEQ ID NO: 1780 - protein, 10 aa, Homo Sapiens
  sequence located in NOTCH1 OR TAN1 at 1361-1370 and may interact with Sequence 1779 in this patent.
GGTCISGPRS

SEQ ID NO: 1781 - protein, 10 aa, Homo Sapiens
  sequence located in CD72 at 19-28 and may interact with Sequence 1782 in this patent.
KSISSRLGQD

SEQ ID NO: 1782 - protein, 10 aa, Homo Sapiens
  sequence located in JUP OR DP3 at 305-314 and may interact with Sequence 1781 in this patent.
LANGGPQALV

SEQ ID NO: 1783 - protein, 10 aa, Homo Sapiens
  sequence located in CD72 at 72-81 and may interact with Sequence 1784 in this patent.
ASWRAVTSPA

SEQ ID NO: 1784 - protein, 10 aa, Homo Sapiens
  sequence located in PSF at 686-695 and may interact with Sequence 1783 in this patent.
GTPAGYGRGR

SEQ ID NO: 1785 - protein, 10 aa, Homo Sapiens
  sequence located in CD72 at 52-61 and may interact with Sequence 1786 in this patent.
SSLASSVLGD

SEQ ID NO: 1786 - protein, 10 aa, Homo Sapiens
  sequence located in SCNN1G at 62-71 and may interact with Sequence 1785 in this patent.
VTENTTGKAA

SEQ ID NO: 1787 - protein, 10 aa, Homo Sapiens
  sequence located in CD72 at 140-149 and may interact with Sequence 1788 in this patent.
RQQLRLKITQ

SEQ ID NO: 1788 - protein, 10 aa, Homo Sapiens
  sequence located in SYCP1 OR SCP1 at 753-762 and may interact with Sequence 1787 in this patent.
LSNLKAELLS

SEQ ID NO: 1789 - protein, 10 aa, Homo Sapiens
  sequence located in CD72 at 141-150 and may interact with Sequence 1790 in this patent.
QQLRLKITQL

SEQ ID NO: 1790 - protein, 10 aa, Homo Sapiens
  sequence located in SYCP1 OR SCP1 at 752-761 and may interact with Sequence 1789 in this patent.
ELSNLKAELL

SEQ ID NO: 1791 - protein, 10 aa, Homo Sapiens
  sequence located in CD72 at 71-80 and may interact with Sequence 1792 in this patent.
TASWRAVTSP

SEQ ID NO: 1792 - protein, 10 aa, Homo Sapiens
  sequence located in SFRS9 OR SRP30C at 99-108 and may interact with Sequence 1791 in this patent.
GGRNGPPTRR

SEQ ID NO: 1793 - protein, 10 aa, Homo Sapiens
  sequence located in CD72 at 72-81 and may interact with Sequence 1794 in this patent.
ASWRAVTSPA

SEQ ID NO: 1794 - protein, 10 aa, Homo Sapiens
  sequence located in SFRS9 OR SRP30C at 98-107 and may interact with Sequence 1793 in this patent.
RGGRNGPPTR

SEQ ID NO: 1795 - protein, 10 aa, Homo Sapiens
  sequence located in CD72 at 225-234 and may interact with Sequence 1796 in this patent.
TCGSADTCCP

SEQ ID NO: 1796 - protein, 10 aa, Homo Sapiens
  sequence located in GH2 at 931-940 and may interact with Sequence 1795 in this patent.
RRSRSVGRRR

SEQ ID NO: 1797 - protein, 10 aa, Homo Sapiens
  sequence located in CD72 at 97-106 and may interact with Sequence 1798 in this patent.
LLGLLLTCLL

SEQ ID NO: 1798 - protein, 10 aa, Homo Sapiens
  sequence located in XE7 at 288-297 and may interact with Sequence 1797 in this patent.
QKRREKEAEE

SEQ ID NO: 1799 - protein, 10 aa, Homo Sapiens
  sequence located in CD72 at 98-107 and may interact with Sequence 1800 in this patent.
LGLLLTCLLL

SEQ ID NO: 1800 - protein, 10 aa, Homo Sapiens
  sequence located in XE7 at 287-296 and may interact with Sequence 1799 in this patent.
EQKRREKEAE

SEQ ID NO: 1801 - protein, 10 aa, Homo Sapiens
  sequence located in CD80 OR CD28LG1 OR CD28LG OR LAB7 at 266-275 and may interact with Sequence 1802 in this patent.
CFAPRCRERR

SEQ ID NO: 1802 - protein, 10 aa, Homo Sapiens
  sequence located in CHAT at 682-691 and may interact with Sequence 1801 in this patent.
SAFPAARGET

SEQ ID NO: 1803 - protein, 10 aa, Homo Sapiens
  sequence located in CD80 OR CD28LG1 OR CD28LG OR LAB7 at 276-285 and may interact with Sequence 1804 in this patent.
RNERLRRESV

SEQ ID NO: 1804 - protein, 10 aa, Homo Sapiens
  sequence located in HSD17B2 OR EDH17B2 at 328-337 and may interact with Sequence 1803 in this patent.
AILAKSPFAY

SEQ ID NO: 1805 - protein, 10 aa, Homo Sapiens
  sequence located in CD80 OR CD28LG1 OR CD28LG OR LAB7 at 274-283 and may interact with Sequence 1806 in this patent.
RRRNERLRRE

SEQ ID NO: 1806 - protein, 10 aa, Homo Sapiens
  sequence located in ERK5 OR ERK4 at 663-672 and may interact with Sequence 1805 in this patent.
LAAQSLVPPP

SEQ ID NO: 1807 - protein, 10 aa, Homo Sapiens
  sequence located in CD80 OR CD28LG1 OR CD28LG OR LAB7 at 273-282 and may interact with Sequence 1808 in this patent.
ERRRNERLRR

SEQ ID NO: 1808 - protein, 10 aa, Homo Sapiens
  sequence located in EVX1 at 384-393 and may interact with Sequence 1807 in this patent.
FAPSVLSKAS

SEQ ID NO: 1809 - protein, 10 aa, Homo Sapiens
  sequence located in CD80 OR CD28LG1 OR CD28LG OR LAB7 at 272-281 and may interact with Sequence 1810 in this patent.
RERRRNERLR

SEQ ID NO: 1810 - protein, 10 aa, Homo Sapiens
  sequence located in EVX1 at 383-392 and may interact with Sequence 1809 in this patent.
TFAPSVLSKA

SEQ ID NO: 1811 - protein, 10 aa, Homo Sapiens
  sequence located in CD80 OR CD28LG1 OR CD28LG OR LAB7 at 269-278 and may interact with Sequence 1812 in this patent.
PRCRERRRNE

SEQ ID NO: 1812 - protein, 10 aa, Homo Sapiens
  sequence located in LCK at 12-21 and may interact with Sequence 1811 in this patent.
LISTALAGPW

SEQ ID NO: 1813 - protein, 10 aa, Homo Sapiens
  sequence located in CD80 OR CD28LG1 OR CD28LG OR LAB7 at 274-283 and may interact with Sequence 1814 in this patent.
RRRNERLRRE

SEQ ID NO: 1814 - protein, 10 aa, Homo Sapiens
  sequence located in MOZ at 1001-1010 and may interact with Sequence 1813 in this patent.
SPPILTKPTL

SEQ ID NO: 1815 - protein, 10 aa, Homo Sapiens
  sequence located in CD80 OR CD28LG1 OR CD28LG OR LAB7 at 155-164 and may interact with Sequence 1816 in this patent.
SNIRRIICST

SEQ ID NO: 1816 - protein, 10 aa, Homo Sapiens
  sequence located in PGA3 AND PGA4 AND PGA5 at 231-240 and may interact with Sequence 1815 in this patent.
GIDSSYYTGS

SEQ ID NO: 1817 - protein, 10 aa, Homo Sapiens
  sequence located in CD80 OR CD28LG1 OR CD28LG OR LAB7 at 154-163 and may interact with Sequence 1818 in this patent.
TSNIRRIICS

SEQ ID NO: 1818 - protein, 10 aa, Homo Sapiens
  sequence located in PGA3 AND PGA4 AND PGA5 at 230-239 and may interact with Sequence 1817 in this patent.
GGIDSSYYTG

SEQ ID NO: 1819 - protein, 10 aa, Homo Sapiens
  sequence located in CD80 OR CD28LG1 OR CD28LG OR LAB7 at 274-283 and may interact with Sequence 1820 in this patent.
RRRNERLRRE

SEQ ID NO: 1820 - protein, 10 aa, Homo Sapiens
  sequence located in SGSH OR HSS at 110-119 and may interact with Sequence 1819 in this patent.
FASQTLVPPA

SEQ ID NO: 1821 - protein, 10 aa, Homo Sapiens
  sequence located in CD80 OR CD28LG1 OR CD28LG OR LAB7 at 128-137 and may interact with Sequence 1822 in this patent.
REHLAEVTLS

SEQ ID NO: 1822 - protein, 10 aa, Homo Sapiens
  sequence located in TRADD at 131-140 and may interact with Sequence 1821 in this patent.
TERDLREVFS

SEQ ID NO: 1823 - protein, 10 aa, Homo Sapiens
  sequence located in CD80 OR CD28LG1 OR CD28LG OR LAB7 at 270-279 and may interact with Sequence 1824 in this patent.
RCRERRRNER

SEQ ID NO: 1824 - protein, 10 aa, Homo Sapiens
  sequence located in PRSS1 OR TRY1 OR TRP1 OR TRYP1 at 8-17 and may interact with Sequence 1823 in this patent.
TFVAAALAAP

SEQ ID NO: 1825 - protein, 10 aa, Homo Sapiens
  sequence located in CD80 OR CD28LG1 OR CD28LG OR LAB7 at 270-279 and may interact with Sequence 1826 in this patent.
RCRERRRNER

SEQ ID NO: 1826 - protein, 10 aa, Homo Sapiens
  sequence located in THBS4 OR TSP4 at 374-383 and may interact with Sequence 1825 in this patent.
PRSLSAPIFT

SEQ ID NO: 1827 - protein, 10 aa, Homo Sapiens
  sequence located in CGRPR at 66-75 and may interact with Sequence 1828 in this patent.
NRTWDGWLCW

SEQ ID NO: 1828 - protein, 10 aa, Homo Sapiens
  sequence located in HSST1 OR NDST1 OR HSST at 247-256 and may interact with Sequence 1827 in this patent.
PAEPAVPGPV

SEQ ID NO: 1829 - protein, 10 aa, Homo Sapiens
  sequence located in CHN1 OR CHN OR ARHGAP2 at 38-47 and may interact with Sequence 1830 in this patent.
LGSPKSSVTI

SEQ ID NO: 1830 - protein, 10 aa, Homo Sapiens
  sequence located in GAD1 OR GAD at 83-92 and may interact with Sequence 1829 in this patent.
DRDARFRRTE

SEQ ID NO: 1831 - protein, 10 aa, Homo Sapiens
  sequence located in CHN1 OR CHN OR ARHGAP2 at 26-35 and may interact with Sequence 1832 in this patent.
QQDLLIAALG

SEQ ID NO: 1832 - protein, 10 aa, Homo Sapiens
  sequence located in LOR OR LRN at 676-685 and may interact with Sequence 1831 in this patent.
LLIKQYCRES

SEQ ID NO: 1833 - protein, 10 aa, Homo Sapiens
  sequence located in CHN1 OR CHN OR ARHGAP2 at 25-34 and may interact with Sequence 1834 in this patent.
RQQDLLIAAL

SEQ ID NO: 1834 - protein, 10 aa, Homo Sapiens
  sequence located in LOR OR LRN at 675-684 and may interact with Sequence 1833 in this patent.
TLLIKQYCRE

SEQ ID NO: 1835 - protein, 10 aa, Homo Sapiens
  sequence located in CHN1 OR CHN OR ARHGAP2 at 166-175 and may interact with Sequence 1836 in this patent.
EIESRGLNSE

SEQ ID NO: 1836 - protein, 10 aa, Homo Sapiens
  sequence located in SLC1A4 OR ASCT1 OR SATT at 139-148 and may interact with Sequence 1835 in this patent.
LGVKSPGLYF

SEQ ID NO: 1837 - protein, 10 aa, Homo Sapiens
  sequence located in CMKBR2 at 139-148 and may interact with Sequence 1838 in this patent.
VFALRARTVT

SEQ ID NO: 1838 - protein, 10 aa, Homo Sapiens
  sequence located in EAAT5 at 210-219 and may interact with Sequence 1837 in this patent.
YKSEPGTSDG

SEQ ID NO: 1839 - protein, 10 aa, Homo Sapiens
  sequence located in CMKBR2 at 15-24 and may interact with Sequence 1840 in this patent.
SYYDDVGLLC

SEQ ID NO: 1840 - protein, 10 aa, Homo Sapiens
  sequence located in ETFDH at 66-75 and may interact with Sequence 1839 in this patent.
AEEADVVIVG

SEQ ID NO: 1841 - protein, 10 aa, Homo Sapiens
  sequence located in CMKBR2 at 16-25 and may interact with Sequence 1842 in this patent.
YYDDVGLLCE

SEQ ID NO: 1842 - protein, 10 aa, Homo Sapiens
  sequence located in ETFDH at 65-74 and may interact with Sequence 1841 in this patent.
FAEEADVVIV

SEQ ID NO: 1843 - protein, 10 aa, Homo Sapiens
  sequence located in CMKBR2 at 338-347 and may interact with Sequence 1844 in this patent.
RTSSVSPSTA

SEQ ID NO: 1844 - protein, 10 aa, Homo Sapiens
  sequence located in GCS1 at 27-36 and may interact with Sequence 1843 in this patent.
PGRRDGRGGG

SEQ ID NO: 1845 - protein, 10 aa, Homo Sapiens
  sequence located in CMKBR2 at 338-347 and may interact with Sequence 1846 in this patent.
RTSSVSPSTA

SEQ ID NO: 1846 - protein, 10 aa, Homo Sapiens
  sequence located in KRT9 at 607-616 and may interact with Sequence 1845 in this patent.
GSGGGYGGGS

SEQ ID NO: 1847 - protein, 10 aa, Homo Sapiens
  sequence located in CMKBR2 at 338-347 and may interact with Sequence 1848 in this patent.
RTSSVSPSTA

SEQ ID NO: 1848 - protein, 10 aa, Homo Sapiens
  sequence located in KRT9 at 566-575 and may interact with Sequence 1847 in this patent.
GSGGGYGGGS

SEQ ID NO: 1849 - protein, 10 aa, Homo Sapiens
  sequence located in CMKBR2 at 338-347 and may interact with Sequence 1850 in this patent.
RTSSVSPSTA

SEQ ID NO: 1850 - protein, 10 aa, Homo Sapiens
  sequence located in KRT9 at 528-537 and may interact with Sequence 1849 in this patent.
GSGGGYGGGS

SEQ ID NO: 1851 - protein, 10 aa, Homo Sapiens
  sequence located in CMKBR2 at 338-347 and may interact with Sequence 1852 in this patent.
RTSSVSPSTA

SEQ ID NO: 1852 - protein, 10 aa, Homo Sapiens
  sequence located in KRT9 at 500-509 and may interact with Sequence 1851 in this patent.
GSGGGYGGGS

SEQ ID NO: 1853 - protein, 10 aa, Homo Sapiens
  sequence located in CMKBR2 at 338-347 and may interact with Sequence 1854 in this patent.
RTSSVSPSTA

SEQ ID NO: 1854 - protein, 10 aa, Homo Sapiens
  sequence located in KRT9 at 608-617 and may interact with Sequence 1853 in this patent.
SGGGYGGGSG

SEQ ID NO: 1855 - protein, 10 aa, Homo Sapiens
  sequence located in CMKBR2 at 338-347 and may interact with Sequence 1856 in this patent.
RTSSVSPSTA

SEQ ID NO: 1856 - protein, 10 aa, Homo Sapiens
  sequence located in KRT9 at 567-576 and may interact with Sequence 1855 in this patent.
SGGGYGGGSG

SEQ ID NO: 1857 - protein, 10 aa, Homo Sapiens
  sequence located in CMKBR2 at 338-347 and may interact with Sequence 1858 in this patent.
RTSSVSPSTA

SEQ ID NO: 1858 - protein, 10 aa, Homo Sapiens
  sequence located in KRT9 at 529-538 and may interact with Sequence 1857 in this patent.
SGGGYGGGSG

SEQ ID NO: 1859 - protein, 10 aa, Homo Sapiens
  sequence located in CMKBR2 at 338-347 and may interact with Sequence 1860 in this patent.
RTSSVSPSTA

SEQ ID NO: 1860 - protein, 10 aa, Homo Sapiens
  sequence located in KRT9 at 501-510 and may interact with Sequence 1859 in this patent.
SGGGYGGGSG

SEQ ID NO: 1861 - protein, 10 aa, Homo Sapiens
  sequence located in CMKBR2 at 338-347 and may interact with Sequence 1862 in this patent.
RTSSVSPSTA

SEQ ID NO: 1862 - protein, 10 aa, Homo Sapiens
  sequence located in KRT10 at 561-570 and may interact with Sequence 1861 in this patent.
SSGGGYGGGS

SEQ ID NO: 1863 - protein, 10 aa, Homo Sapiens
  sequence located in CMKBR2 at 338-347 and may interact with Sequence 1864 in this patent.
RTSSVSPSTA

SEQ ID NO: 1864 - protein, 10 aa, Homo Sapiens
  sequence located in KRT10 at 508-517 and may interact with Sequence 1863 in this patent.
SSGGGYGGGS

SEQ ID NO: 1865 - protein, 10 aa, Homo Sapiens
  sequence located in CMKBR2 at 338-347 and may interact with Sequence 1866 in this patent.
RTSSVSPSTA

SEQ ID NO: 1866 - protein, 10 aa, Homo Sapiens
  sequence located in KRT10 at 494-503 and may interact with Sequence 1865 in this patent.
SSGGGYGGGS

SEQ ID NO: 1867 - protein, 10 aa, Homo Sapiens
  sequence located in CMKBR2 at 338-347 and may interact with Sequence 1868 in this patent.
RTSSVSPSTA

SEQ ID NO: 1868 - protein, 10 aa, Homo Sapiens
  sequence located in KRT10 at 562-571 and may interact with Sequence 1867 in this patent.
SGGGYGGGSS

SEQ ID NO: 1869 - protein, 10 aa, Homo Sapiens
  sequence located in CMKBR2 at 338-347 and may interact with Sequence 1870 in this patent.
RTSSVSPSTA

SEQ ID NO: 1870 - protein, 10 aa, Homo Sapiens
  sequence located in KRT10 at 535-544 and may interact with Sequence 1869 in this patent.
SSGGYGGGSS

SEQ ID NO: 1871 - protein, 10 aa, Homo Sapiens
  sequence located in CMKBR2 at 338-347 and may interact with Sequence 1872 in this patent.
RTSSVSPSTA

SEQ ID NO: 1872 - protein, 10 aa, Homo Sapiens
  sequence located in KRT10 at 518-527 and may interact with Sequence 1871 in this patent.
SSGGHGGGSS

SEQ ID NO: 1873 - protein, 10 aa, Homo Sapiens
  sequence located in CMKBR2 at 338-347 and may interact with Sequence 1874 in this patent.
RTSSVSPSTA

SEQ ID NO: 1874 - protein, 10 aa, Homo Sapiens
  sequence located in KRT10 at 509-518 and may interact with Sequence 1873 in this patent.
SGGGYGGGSS

SEQ ID NO: 1875 - protein, 10 aa, Homo Sapiens
  sequence located in CMKBR2 at 338-347 and may interact with Sequence 1876 in this patent.
RTSSVSPSTA

SEQ ID NO: 1876 - protein, 10 aa, Homo Sapiens
  sequence located in KRT10 at 495-504 and may interact with Sequence 1875 in this patent.
SGGGYGGGSS

SEQ ID NO: 1877 - protein, 10 aa, Homo Sapiens
  sequence located in CMKBR2 at 338-347 and may interact with Sequence 1878 in this patent.
RTSSVSPSTA

SEQ ID NO: 1878 - protein, 10 aa, Homo Sapiens
  sequence located in KRT1 OR KRTA at 582-591 and may interact with Sequence 1877 in this patent.
SSGGYRGGSG

SEQ ID NO: 1879 - protein, 10 aa, Homo Sapiens
  sequence located in CMKBR2 at 335-344 and may interact with Sequence 1880 in this patent.
KLERTSSVSP

SEQ ID NO: 1880 - protein, 10 aa, Homo Sapiens
  sequence located in PCD17 at 230-239 and may interact with Sequence 1879 in this patent.
GAYRARALEL

SEQ ID NO: 1881 - protein, 10 aa, Homo Sapiens
  sequence located in CMKBR2 at 336-345 and may interact with Sequence 1882 in this patent.
LERTSSVSPS

SEQ ID NO: 1882 - protein, 10 aa, Homo Sapiens
  sequence located in PCD17 at 229-238 and may interact with Sequence 1881 in this patent.
TGAYRARALE

SEQ ID NO: 1883 - protein, 10 aa, Homo Sapiens
  sequence located in CMKBR2 at 339-348 and may interact with Sequence 1884 in this patent.
TSSVSPSTAE

SEQ ID NO: 1884 - protein, 10 aa, Homo Sapiens
  sequence located in HNRPF at 243-252 and may interact with Sequence 1883 in this patent.
FGGRGGYGGG

SEQ ID NO: 1885 - protein, 10 aa, Homo Sapiens
  sequence located in CMKBR2 at 339-348 and may interact with Sequence 1886 in this patent.
TSSVSPSTAE

SEQ ID NO: 1886 - protein, 10 aa, Homo Sapiens
  sequence located in Unknown at 702-711 and may interact with Sequence 1885 in this patent.
GGGHRGRGGL

SEQ ID NO: 1887 - protein, 10 aa, Homo Sapiens
  sequence located in CMKBR2 at 43-52 and may interact with Sequence 1888 in this patent.
LVFTVGLLGN

SEQ ID NO: 1888 - protein, 10 aa, Homo Sapiens
  sequence located in TPM1 OR TMSA at 118-127 and may interact with Sequence 1887 in this patent.
IAEEADRKYE

SEQ ID NO: 1889 - protein, 10 aa, Homo Sapiens
  sequence located in CMKBR2 at 44-53 and may interact with Sequence 1890 in this patent.
VFTVGLLGNV

SEQ ID NO: 1890 - protein, 10 aa, Homo Sapiens
  sequence located in TPM1 OR TMSA at 117-126 and may interact with Sequence 1889 in this patent.
HIAEEADRKY

SEQ ID NO: 1891 - protein, 10 aa, Homo Sapiens
  sequence located in CMKBR2 at 225-234 and may interact with Sequence 1892 in this patent.
TLLRCPSKKK

SEQ ID NO: 1892 - protein, 10 aa, Homo Sapiens
  sequence located in KIAA0391 at 84-93 and may interact with Sequence 1891 in this patent.
FFLAGAAKER

SEQ ID NO: 1893 - protein, 10 aa, Homo Sapiens
  sequence located in CMKBR6 OR STRL22 OR GPR29 OR CKRL3 at 342-351 and may interact with Sequence 1894 in this patent.
KSSGFSCAGR

SEQ ID NO: 1894 - protein, 10 aa, Homo Sapiens
  sequence located in CYP2A7 at 297-306 and may interact with Sequence 1893 in this patent.
FAGTETTSTT

SEQ ID NO: 1895 - protein, 10 aa, Homo Sapiens
  sequence located in CMKBR6 OR STRL22 OR GPR29 OR CKRL3 at 150-159 and may interact with Sequence 1896 in this patent.
ATKSFRLRSR

SEQ ID NO: 1896 - protein, 10 aa, Homo Sapiens
  sequence located in CYP21B OR CYP21 OR CYP21A2 at 725-734 and may interact with Sequence 1895 in this patent.
SGPEAEGLGS

SEQ ID NO: 1897 - protein, 10 aa, Homo Sapiens
  sequence located in CMKBR6 OR STRL22 OR GPR29 OR CKRL3 at 151-160 and may interact with Sequence 1898 in this patent.
TKSFRLRSRT

SEQ ID NO: 1898 - protein, 10 aa, Homo Sapiens
  sequence located in CYP21B OR CYP21 OR CYP21A2 at 724-733 and may interact with Sequence 1897 in this patent.
RSGPEAEGLG

SEQ ID NO: 1899 - protein, 10 aa, Homo Sapiens
  sequence located in CMKBR6 OR STRL22 OR GPR29 OR CKRL3 at 360-369 and may interact with Sequence 1900 in this patent.
TSETADNDNA

SEQ ID NO: 1900 - protein, 10 aa, Homo Sapiens
  sequence located in DHH at 164-173 and may interact with Sequence 1899 in this patent.
SIVVVSSLAG

SEQ ID NO: 1901 - protein, 10 aa, Homo Sapiens
  sequence located in CMKBR6 OR STRL22 OR GPR29 OR CKRL3 at 361-370 and may interact with Sequence 1902 in this patent.
SETADNDNAS

SEQ ID NO: 1902 - protein, 10 aa, Homo Sapiens
  sequence located in DHH at 163-172 and may interact with Sequence 1901 in this patent.
GSIVVVSSLA

SEQ ID NO: 1903 - protein, 10 aa, Homo Sapiens
  sequence located in CMKBR6 OR STRL22 OR GPR29 OR CKRL3 at 107-116 and may interact with Sequence 1904 in this patent.
ATGAWVFSNA

SEQ ID NO: 1904 - protein, 10 aa, Homo Sapiens
  sequence located in DHPS OR DS at 317-326 and may interact with Sequence 1903 in this patent.
SGARPDEAVS

SEQ ID NO: 1905 - protein, 10 aa, Homo Sapiens
  sequence located in CMKBR6 OR STRL22 OR GPR29 OR CKRL3 at 149-158 and may interact with Sequence 1906 in this patent.
QATKSFRLRS

SEQ ID NO: 1906 - protein, 10 aa, Homo Sapiens
  sequence located in FES OR FPS at 77-86 and may interact with Sequence 1905 in this patent.
TSQTEGLSRL

SEQ ID NO: 1907 - protein, 10 aa, Homo Sapiens
  sequence located in CMKBR6 OR STRL22 OR GPR29 OR CKRL3 at 243-252 and may interact with Sequence 1908 in this patent.
QAQNSKRHKA

SEQ ID NO: 1908 - protein, 10 aa, Homo Sapiens
  sequence located in GCNT1 at 24-33 and may interact with Sequence 1907 in this patent.
LSLITFSVLR

SEQ ID NO: 1909 - protein, 10 aa, Homo Sapiens
  sequence located in CMKBR6 OR STRL22 OR GPR29 OR CKRL3 at 155-164 and may interact with Sequence 1910 in this patent.
RLRSRTLPRS

SEQ ID NO: 1910 - protein, 10 aa, Homo Sapiens
  sequence located in HK1 at 445-454 and may interact with Sequence 1909 in this patent.
SESGSGKGAA

SEQ ID NO: 1911 - protein, 10 aa, Homo Sapiens
  sequence located in CMKBR6 OR STRL22 OR GPR29 OR CKRL3 at 355-364 and may interact with Sequence 1912 in this patent.
NISRQTSETA

SEQ ID NO: 1912 - protein, 10 aa, Homo Sapiens
  sequence located in IL7R at 365-374 and may interact with Sequence 1911 in this patent.
SSLTCLAGNV

SEQ ID NO: 1913 - protein, 10 aa, Homo Sapiens
  sequence located in CMKBR6 OR STRL22 OR GPR29 OR CKRL3 at 250-259 and may interact with Sequence 1914 in this patent.
HKAIRVIIAV

SEQ ID NO: 1914 - protein, 10 aa, Homo Sapiens
  sequence located in RBP3 at 193-202 and may interact with Sequence 1913 in this patent.
DGYYYPDSLV

SEQ ID NO: 1915 - protein, 10 aa, Homo Sapiens
  sequence located in CMKBR6 OR STRL22 OR GPR29 OR CKRL3 at 336-345 and may interact with Sequence 1916 in this patent.
CVRRKYKSSG

SEQ ID NO: 1916 - protein, 10 aa, Homo Sapiens
  sequence located in KCNJ9 OR GIRK3 at 168-177 and may interact with Sequence 1915 in this patent.
AATLVFSSHA

SEQ ID NO: 1917 - protein, 10 aa, Homo Sapiens
  sequence located in CMKBR6 OR STRL22 OR GPR29 OR CKRL3 at 190-199 and may interact with Sequence 1918 in this patent.
NTQGSDVCEP

SEQ ID NO: 1918 - protein, 10 aa, Homo Sapiens
  sequence located in LAMA1 OR LAMA at 2208-2217 and may interact with Sequence 1917 in this patent.
RFGNIGSLSV

SEQ ID NO: 1919 - protein, 10 aa, Homo Sapiens
  sequence located in CMKBR6 OR STRL22 OR GPR29 OR CKRL3 at 103-112 and may interact with Sequence 1920 in this patent.
AVSHATGAWV

SEQ ID NO: 1920 - protein, 10 aa, Homo Sapiens
  sequence located in MBP1 at 214-223 and may interact with Sequence 1919 in this patent.
NPGSGGMTHS

SEQ ID NO: 1921 - protein, 10 aa, Homo Sapiens
  sequence located in CMKBR6 OR STRL22 OR GPR29 OR CKRL3 at 147-156 and may interact with Sequence 1922 in this patent.
IVQATKSFRL

SEQ ID NO: 1922 - protein, 10 aa, Homo Sapiens
  sequence located in M6PR OR MPRD OR MPR46 at 778-787 and may interact with Sequence 1921 in this patent.
YDLSSLAKSE

SEQ ID NO: 1923 - protein, 10 aa, Homo Sapiens
  sequence located in CMKBR6 OR STRL22 OR GPR29 OR CKRL3 at 108-117 and may interact with Sequence 1924 in this patent.
TGAWVFSNAT

SEQ ID NO: 1924 - protein, 10 aa, Homo Sapiens
  sequence located in Unknown at 106-115 and may interact with Sequence 1923 in this patent.
GSVTEHPSPS

SEQ ID NO: 1925 - protein, 10 aa, Homo Sapiens
  sequence located in CMKBR6 OR STRL22 OR GPR29 OR CKRL3 at 156-165 and may interact with Sequence 1926 in this patent.
LRSRTLPRSK

SEQ ID NO: 1926 - protein, 10 aa, Homo Sapiens
  sequence located in RPS29 at 115-124 and may interact with Sequence 1925 in this patent.
QTRAGQRTRF

SEQ ID NO: 1927 - protein, 10 aa, Homo Sapiens
  sequence located in CMKBR6 OR STRL22 OR GPR29 OR CKRL3 at 215-224 and may interact with Sequence 1928 in this patent.
LGLELLFGFF

SEQ ID NO: 1928 - protein, 10 aa, Homo Sapiens
  sequence located in TRIP8 at 103-112 and may interact with Sequence 1927 in this patent.
KPELKEEPEE

SEQ ID NO: 1929 - protein, 10 aa, Homo Sapiens
  sequence located in CMKBR6 OR STRL22 OR GPR29 OR CKRL3 at 363-372 and may interact with Sequence 1930 in this patent.
TADNDNASSF

SEQ ID NO: 1930 - protein, 10 aa, Homo Sapiens
  sequence located in TFRC at 252-261 and may interact with Sequence 1929 in this patent.
GSIVIVRAGK

SEQ ID NO: 1931 - protein, 10 aa, Homo Sapiens
  sequence located in CMKBR7 OR EBI1 OR EVI1 at 339-348 and may interact with Sequence 1932 in this patent.
KLFKDLGCLS

SEQ ID NO: 1932 - protein, 10 aa, Homo Sapiens
  sequence located in THOP1 at 535-544 and may interact with Sequence 1931 in this patent.
LEKLIESRQA

SEQ ID NO: 1933 - protein, 10 aa, Homo Sapiens
  sequence located in CMKBR7 OR EBI1 OR EVI1 at 240-249 and may interact with Sequence 1934 in this patent.
SFCYLVIIRT

SEQ ID NO: 1934 - protein, 10 aa, Homo Sapiens
  sequence located in MYH9 at 224-233 and may interact with Sequence 1933 in this patent.
AKTVKNDNSS

SEQ ID NO: 1935 - protein, 10 aa, Homo Sapiens
  sequence located in CMKBR7 OR EBI1 OR EVI1 at 311-320 and may interact with Sequence 1936 in this patent.
TYSLACVRCC

SEQ ID NO: 1936 - protein, 10 aa, Homo Sapiens
  sequence located in PBX2 at 323-332 and may interact with Sequence 1935 in this patent.
SVTQGGHSRT

SEQ ID NO: 1937 - protein, 10 aa, Homo Sapiens
  sequence located in CMKBR7 OR EBI1 OR EVI1 at 299-308 and may interact with Sequence 1938 in this patent.
ELSKQLNIAY

SEQ ID NO: 1938 - protein, 10 aa, Homo Sapiens
  sequence located in PDGFA at 44-53 and may interact with Sequence 1937 in this patent.
LQRLLEIDSV

SEQ ID NO: 1939 - protein, 10 aa, Homo Sapiens
  sequence located in CMKBR7 OR EBI1 OR EVI1 at 81-90 and may interact with Sequence 1940 in this patent.
LTYIYFKRLK

SEQ ID NO: 1940 - protein, 10 aa, Homo Sapiens
  sequence located in RARA OR NR1B1 at 356-365 and may interact with Sequence 1939 in this patent.
LEALKVYVRK

SEQ ID NO: 1941 - protein, 10 aa, Homo Sapiens
  sequence located in CMKBR7 OR EBI1 OR EVI1 at 311-320 and may interact with Sequence 1942 in this patent.
TYSLACVRCC

SEQ ID NO: 1942 - protein, 10 aa, Homo Sapiens
  sequence located in IGHMBP2 OR SMUBP2 OR SMBP2 at 936-945 and may interact with Sequence 1941 in this patent.
ARAHARQRIS

SEQ ID NO: 1943 - protein, 10 aa, Homo Sapiens
  sequence located in CMKBR7 OR EBI1 OR EVI1 at 41-50 and may interact with Sequence 1944 in this patent.
YTLFESLCSK

SEQ ID NO: 1944 - protein, 10 aa, Homo Sapiens
  sequence located in AZGP1 OR ZAG at 738-747 and may interact with Sequence 1943 in this patent.
LATKTLEERI

SEQ ID NO: 1945 - protein, 10 aa, Homo Sapiens
  sequence located in CPLX1 at 90-99 and may interact with Sequence 1946 in this patent.
CEGSLTRPKK

SEQ ID NO: 1946 - protein, 10 aa, Homo Sapiens
  sequence located in MRC1 at 309-318 and may interact with Sequence 1945 in this patent.
FLGAGEAALG

SEQ ID NO: 1947 - protein, 10 aa, Homo Sapiens
  sequence located in CPLX1 at 73-82 and may interact with Sequence 1948 in this patent.
KKKEEKEAEE

SEQ ID NO: 1948 - protein, 10 aa, Homo Sapiens
  sequence located in PTGS1 OR COX1 at 6-15 and may interact with Sequence 1947 in this patent.
LLRFLLFLLL

SEQ ID NO: 1949 - protein, 10 aa, Homo Sapiens
  sequence located in CPLX1 at 74-83 and may interact with Sequence 1950 in this patent.
KKEEKEAEEK

SEQ ID NO: 1950 - protein, 10 aa, Homo Sapiens
  sequence located in PTGS1 OR COX1 at 5-14 and may interact with Sequence 1949 in this patent.
LLLRFLLFLL

SEQ ID NO: 1951 - protein, 10 aa, Homo Sapiens
  sequence located in CPLX1 at 75-84 and may interact with Sequence 1952 in this patent.
KEEKEAEEKA

SEQ ID NO: 1952 - protein, 10 aa, Homo Sapiens
  sequence located in PTGS1 OR COX1 at 4-13 and may interact with Sequence 1951 in this patent.
SLLLRFLLFL

SEQ ID NO: 1953 - protein, 10 aa, Homo Sapiens
  sequence located in CPLX1 at 76-85 and may interact with Sequence 1954 in this patent.
EEKEAEEKAA

SEQ ID NO: 1954 - protein, 10 aa, Homo Sapiens
  sequence located in PTGS1 OR COX1 at 3-12 and may interact with Sequence 1953 in this patent.
RSLLLRFLLF

SEQ ID NO: 1955 - protein, 10 aa, Homo Sapiens
  sequence located in CMKLR1 OR DEZ at 158-167 and may interact with Sequence 1956 in this patent.
ALARAMRCSL

SEQ ID NO: 1956 - protein, 10 aa, Homo Sapiens
  sequence located in DCC at 1132-1141 and may interact with Sequence 1955 in this patent.
KRATHSAGKR

SEQ ID NO: 1957 - protein, 10 aa, Homo Sapiens
  sequence located in CMKLR1 OR DEZ at 159-168 and may interact with Sequence 1958 in this patent.
LARAMRCSLF

SEQ ID NO: 1958 - protein, 10 aa, Homo Sapiens
  sequence located in DCC at 1131-1140 and may interact with Sequence 1957 in this patent.
KKRATHSAGK

SEQ ID NO: 1959 - protein, 10 aa, Homo Sapiens
  sequence located in CMKLR1 OR DEZ at 39-48 and may interact with Sequence 1960 in this patent.
GTALANGTGE

SEQ ID NO: 1960 - protein, 10 aa, Homo Sapiens
  sequence located in ELK3 OR NET at 184-193 and may interact with Sequence 1959 in this patent.
LASAIRKSGA

SEQ ID NO: 1961 - protein, 10 aa, Homo Sapiens
  sequence located in CMKLR1 OR DEZ at 134-143 and may interact with Sequence 1962 in this patent.
SLFLQVNMYS

SEQ ID NO: 1962 - protein, 10 aa, Homo Sapiens
  sequence located in INE1 at 149-158 and may interact with Sequence 1961 in this patent.
GIHVYLKEKG

SEQ ID NO: 1963 - protein, 10 aa, Homo Sapiens
  sequence located in CMKLR1 OR DEZ at 38-47 and may interact with Sequence 1964 in this patent.
LGTALANGTG

SEQ ID NO: 1964 - protein, 10 aa, Homo Sapiens
  sequence located in KRT10 at 580-589 and may interact with Sequence 1963 in this patent.
SGSVGESSSK

SEQ ID NO: 1965 - protein, 10 aa, Homo Sapiens
  sequence located in CMKLR1 OR DEZ at 187-196 and may interact with Sequence 1966 in this patent.
SATLVPFTAV

SEQ ID NO: 1966 - protein, 10 aa, Homo Sapiens
  sequence located in Unknown at 177-186 and may interact with Sequence 1965 in this patent.
RRRQDGKCRH

SEQ ID NO: 1967 - protein, 10 aa, Homo Sapiens
  sequence located in CMKLR1 OR DEZ at 186-195 and may interact with Sequence 1968 in this patent.
VSATLVPFTA

SEQ ID NO: 1968 - protein, 10 aa, Homo Sapiens
  sequence located in Unknown at 176-185 and may interact with Sequence 1967 in this patent.
HRRRQDGKCR

SEQ ID NO: 1969 - protein, 10 aa, Homo Sapiens
  sequence located in CMKLR1 OR DEZ at 15-24 and may interact with Sequence 1970 in this patent.
YPGTAQPAAP

SEQ ID NO: 1970 - protein, 10 aa, Homo Sapiens
  sequence located in LAF4 at 104-113 and may interact with Sequence 1969 in this patent.
VGPGGLRSGR

SEQ ID NO: 1971 - protein, 10 aa, Homo Sapiens
  sequence located in CMKLR1 OR DEZ at 317-326 and may interact with Sequence 1972 in this patent.
SCLNPLIYSF

SEQ ID NO: 1972 - protein, 10 aa, Homo Sapiens
  sequence located in PKD1 at 2639-2648 and may interact with Sequence 1971 in this patent.
RAQIRKNITE

SEQ ID NO: 1973 - protein, 10 aa, Homo Sapiens
  sequence located in CMKLR1 OR DEZ at 81-90 and may interact with Sequence 1974 in this patent.
LVVNISFREK

SEQ ID NO: 1974 - protein, 10 aa, Homo Sapiens
  sequence located in PSMA1 OR PSC2 OR PROS30 at 164-173 and may interact with Sequence 1973 in this patent.
KNYVNGKTFL

SEQ ID NO: 1975 - protein, 10 aa, Homo Sapiens
  sequence located in CMKLR1 OR DEZ at 248-257 and may interact with Sequence 1976 in this patent.
RGLRPRRQKA

SEQ ID NO: 1976 - protein, 10 aa, Homo Sapiens
  sequence located in RELB at 570-579 and may interact with Sequence 1975 in this patent.
GLLSPGPEAT

SEQ ID NO: 1977 - protein, 10 aa, Homo Sapiens
  sequence located in CMKLR1 OR DEZ at 158-167 and may interact with Sequence 1978 in this patent.
ALARAMRCSL

SEQ ID NO: 1978 - protein, 10 aa, Homo Sapiens
  sequence located in IGHMBP2 OR SMUBP2 OR SMBP2 at 656-665 and may interact with Sequence 1977 in this patent.
SQGSSHAATK

SEQ ID NO: 1979 - protein, 10 aa, Homo Sapiens
  sequence located in CMKLR1 OR DEZ at 157-166 and may interact with Sequence 1980 in this patent.
IALARAMRCS

SEQ ID NO: 1980 - protein, 10 aa, Homo Sapiens
  sequence located in IGHMBP2 OR SMUBP2 OR SMBP2 at 655-664 and may interact with Sequence 1979 in this patent.
NSQGSSHAAT

SEQ ID NO: 1981 - protein, 10 aa, Homo Sapiens
  sequence located in CMKLR1 OR DEZ at 328-337 and may interact with Sequence 1982 in this patent.
GETFRDKLRL

SEQ ID NO: 1982 - protein, 10 aa, Homo Sapiens
  sequence located in KIAA0136 at 285-294 and may interact with Sequence 1981 in this patent.
KTQLVSKSLA

SEQ ID NO: 1983 - protein, 10 aa, Homo Sapiens
  sequence located in CMKLR1 OR DEZ at 329-338 and may interact with Sequence 1984 in this patent.
ETFRDKLRLY

SEQ ID NO: 1984 - protein, 10 aa, Homo Sapiens
  sequence located in KIAA0136 at 284-293 and may interact with Sequence 1983 in this patent.
VKTQLVSKSL

SEQ ID NO: 1985 - protein, 10 aa, Homo Sapiens
  sequence located in PDE6B OR PDEB at 35-44 and may interact with Sequence 1986 in this patent.
GCEDGCPPDC

SEQ ID NO: 1986 - protein, 10 aa, Homo Sapiens
  sequence located in CASK at 172-181 and may interact with Sequence 1985 in this patent.
SGLVAGGRVG

SEQ ID NO: 1987 - protein, 10 aa, Homo Sapiens
  sequence located in PDE6B OR PDEB at 663-672 and may interact with Sequence 1988 in this patent.
AIIATDLALY

SEQ ID NO: 1988 - protein, 10 aa, Homo Sapiens
  sequence located in POLE1 OR POLE at 1891-1900 and may interact with Sequence 1987 in this patent.
SNYGGIKGKV

SEQ ID NO: 1989 - protein, 10 aa, Homo Sapiens
  sequence located in PDE6B OR PDEB at 466-475 and may interact with Sequence 1990 in this patent.
ILPTRARLGK

SEQ ID NO: 1990 - protein, 10 aa, Homo Sapiens
  sequence located in DUSP4 OR HVH2 at 109-118 and may interact with Sequence 1989 in this patent.
DERSPRAESL

SEQ ID NO: 1991 - protein, 10 aa, Homo Sapiens
  sequence located in PDE6B OR PDEB at 840-849 and may interact with Sequence 1992 in this patent.
CNGGPAPKSS

SEQ ID NO: 1992 - protein, 10 aa, Homo Sapiens
  sequence located in DUSP8 OR HVH-5 at 169-178 and may interact with Sequence 1991 in this patent.
RVAPRSGLAA

SEQ ID NO: 1993 - protein, 10 aa, Homo Sapiens
  sequence located in PDE6B OR PDEB at 300-309 and may interact with Sequence 1994 in this patent.
YSGPRTPDGR

SEQ ID NO: 1994 - protein, 10 aa, Homo Sapiens
  sequence located in KRT14 at 23-32 and may interact with Sequence 1993 in this patent.
IGAGSSRISS

SEQ ID NO: 1995 - protein, 10 aa, Homo Sapiens
  sequence located in PDE6B OR PDEB at 299-308 and may interact with Sequence 1996 in this patent.
PYSGPRTPDG

SEQ ID NO: 1996 - protein, 10 aa, Homo Sapiens
  sequence located in KRT14 at 22-31 and may interact with Sequence 1995 in this patent.
GIGAGSSRIS

SEQ ID NO: 1997 - protein, 10 aa, Homo Sapiens
  sequence located in PDE6B OR PDEB at 300-309 and may interact with Sequence 1998 in this patent.
YSGPRTPDGR

SEQ ID NO: 1998 - protein, 10 aa, Homo Sapiens
  sequence located in KRT17 at 23-32 and may interact with Sequence 1997 in this patent.
IGAGSSRISS

SEQ ID NO: 1999 - protein, 10 aa, Homo Sapiens
  sequence located in PDE6B OR PDEB at 299-308 and may interact with Sequence 2000 in this patent.
PYSGPRTPDG

SEQ ID NO: 2000 - protein, 10 aa, Homo Sapiens
  sequence located in KRT17 at 22-31 and may interact with Sequence 1999 in this patent.
GIGAGSSRIS

SEQ ID NO: 2001 - protein, 10 aa, Homo Sapiens
  sequence located in PDE6B OR PDEB at 594-603 and may interact with Sequence 2002 in this patent.
GLCHDIDHRG

SEQ ID NO: 2002 - protein, 10 aa, Homo Sapiens
  sequence located in GRM8 OR MGLUR8 at 203-212 and may interact with Sequence 2001 in this patent.
AQAMVDIVTA

SEQ ID NO: 2003 - protein, 10 aa, Homo Sapiens
  sequence located in PDE6B OR PDEB at 103-112 and may interact with Sequence 2004 in this patent.
VAELATRLFS

SEQ ID NO: 2004 - protein, 10 aa, Homo Sapiens
  sequence located in NUP62 at 682-691 and may interact with Sequence 2003 in this patent.
NGLEGSSEET

SEQ ID NO: 2005 - protein, 10 aa, Homo Sapiens
  sequence located in PDE6B OR PDEB at 300-309 and may interact with Sequence 2006 in this patent.
YSGPRTPDGR

SEQ ID NO: 2006 - protein, 10 aa, Homo Sapiens
  sequence located in PCP at 400-409 and may interact with Sequence 2005 in this patent.
VRPRPSWITT

SEQ ID NO: 2007 - protein, 10 aa, Homo Sapiens
  sequence located in PDE6B OR PDEB at 299-308 and may interact with Sequence 2008 in this patent.
PYSGPRTPDG

SEQ ID NO: 2008 - protein, 10 aa, Homo Sapiens
  sequence located in PCP at 399-408 and may interact with Sequence 2007 in this patent.
GVRPRPSWIT

SEQ ID NO: 2009 - protein, 10 aa, Homo Sapiens
  sequence located in PDE6B OR PDEB at 54-63 and may interact with Sequence 2010 in this patent.
EESTALLELV

SEQ ID NO: 2010 - protein, 10 aa, Homo Sapiens
  sequence located in PLD1 at 176-185 and may interact with Sequence 2009 in this patent.
FLGRRKQLED

SEQ ID NO: 2011 - protein, 10 aa, Homo Sapiens
  sequence located in PDE6B OR PDEB at 843-852 and may interact with Sequence 2012 in this patent.
GPAPKSSTCC

SEQ ID NO: 2012 - protein, 10 aa, Homo Sapiens
  sequence located in SSA2 OR RO60 at 292-301 and may interact with Sequence 2011 in this patent.
GGGRGFGGGS

SEQ ID NO: 2013 - protein, 10 aa, Homo Sapiens
  sequence located in PDE6B OR PDEB at 844-853 and may interact with Sequence 2014 in this patent.
PAPKSSTCCI

SEQ ID NO: 2014 - protein, 10 aa, Homo Sapiens
  sequence located in SSA2 OR RO60 at 291-300 and may interact with Sequence 2013 in this patent.
NGGGRGFGGG

SEQ ID NO: 2015 - protein, 10 aa, Homo Sapiens
  sequence located in PDE6B OR PDEB at 773-782 and may interact with Sequence 2016 in this patent.
GFIDFVCTFV

SEQ ID NO: 2016 - protein, 10 aa, Homo Sapiens
  sequence located in ELK4 OR SAP1 at 117-126 and may interact with Sequence 2015 in this patent.
SKDVENGGKD

SEQ ID NO: 2017 - protein, 10 aa, Homo Sapiens
  sequence located in PDE6B OR PDEB at 773-782 and may interact with Sequence 2018 in this patent.
GFIDFVCTFV

SEQ ID NO: 2018 - protein, 10 aa, Homo Sapiens
  sequence located in ELK4 OR SAP1 at 117-126 and may interact with Sequence 2017 in this patent.
SKDVENGGKD

SEQ ID NO: 2019 - protein, 10 aa, Homo Sapiens
  sequence located in PDE6B OR PDEB at 728-737 and may interact with Sequence 2020 in this patent.
VQSKVALLVA

SEQ ID NO: 2020 - protein, 10 aa, Homo Sapiens
  sequence located in SFRS8 OR SWAP at 110-119 and may interact with Sequence 2019 in this patent.
CDEERYLALH

SEQ ID NO: 2021 - protein, 10 aa, Homo Sapiens
  sequence located in PDE6B OR PDEB at 27-36 and may interact with Sequence 2022 in this patent.
LSPENVGRGC

SEQ ID NO: 2022 - protein, 10 aa, Homo Sapiens
  sequence located in UCP1 OR UCP at 237-246 and may interact with Sequence 2021 in this patent.
KTRFINSPPG

SEQ ID NO: 2023 - protein, 10 aa, Homo Sapiens
  sequence located in PDE6B OR PDEB at 31-40 and may interact with Sequence 2024 in this patent.
NVGRGCEDGC

SEQ ID NO: 2024 - protein, 10 aa, Homo Sapiens
  sequence located in UCP4 at 242-251 and may interact with Sequence 2023 in this patent.
ASILGTPADV

SEQ ID NO: 2025 - protein, 10 aa, Homo Sapiens
  sequence located in PDE6B OR PDEB at 488-497 and may interact with Sequence 2026 in this patent.
ILKEELPGPT

SEQ ID NO: 2026 - protein, 10 aa, Homo Sapiens
  sequence located in ATP6E at 197-206 and may interact with Sequence 2025 in this patent.
YKLLFEGAGS

SEQ ID NO: 2027 - protein, 10 aa, Homo Sapiens
  sequence located in CNTFR at 340-349 and may interact with Sequence 2028 in this patent.
LGSGGGPSAP

SEQ ID NO: 2028 - protein, 10 aa, Homo Sapiens
  sequence located in GUCY2D OR GUC2D OR RETGC1 OR RETGC OR GUC1A4 OR CORD6 at 363-372 and may interact with Sequence 2027 in this patent.
EARAAAGGRW

SEQ ID NO: 2029 - protein, 10 aa, Homo Sapiens
  sequence located in CNTFR at 316-325 and may interact with Sequence 2030 in this patent.
AETTTSTTSS

SEQ ID NO: 2030 - protein, 10 aa, Homo Sapiens
  sequence located in POLE1 OR POLE at 2-11 and may interact with Sequence 2029 in this patent.
SLRSGGRRRA

SEQ ID NO: 2031 - protein, 10 aa, Homo Sapiens
  sequence located in CNTFR at 220-229 and may interact with Sequence 2032 in this patent.
RRLEVTWQTP

SEQ ID NO: 2032 - protein, 10 aa, Homo Sapiens
  sequence located in GCSH at 109-118 and may interact with Sequence 2031 in this patent.
ASELYSPLSG

SEQ ID NO: 2033 - protein, 10 aa, Homo Sapiens
  sequence located in CNTFR at 341-350 and may interact with Sequence 2034 in this patent.
GSGGGPSAPF

SEQ ID NO: 2034 - protein, 10 aa, Homo Sapiens
  sequence located in GRIA1 OR GLUR1 OR GLUH1 at 865-874 and may interact with Sequence 2033 in this patent.
AGASSGGSGE

SEQ ID NO: 2035 - protein, 10 aa, Homo Sapiens
  sequence located in CNTFR at 317-326 and may interact with Sequence 2036 in this patent.
ETTTSTTSSL

SEQ ID NO: 2036 - protein, 10 aa, Homo Sapiens
  sequence located in GPRK6 OR GRK6 at 432-441 and may interact with Sequence 2035 in this patent.
LGCRGGSARE

SEQ ID NO: 2037 - protein, 10 aa, Homo Sapiens
  sequence located in CNTFR at 316-325 and may interact with Sequence 2038 in this patent.
AETTTSTTSS

SEQ ID NO: 2038 - protein, 10 aa, Homo Sapiens
  sequence located in GPRK6 OR GRK6 at 431-440 and may interact with Sequence 2037 in this patent.
RLGCRGGSAR

SEQ ID NO: 2039 - protein, 10 aa, Homo Sapiens
  sequence located in CNTFR at 109-118 and may interact with Sequence 2040 in this patent.
PREPVLSCRS

SEQ ID NO: 2040 - protein, 10 aa, Homo Sapiens
  sequence located in HADH2 OR ERAB OR XH98G2 OR SCHAD at 159-168 and may interact with Sequence 2039 in this patent.
ATTRQDRFAG

SEQ ID NO: 2041 - protein, 10 aa, Homo Sapiens
  sequence located in CNTFR at 104-113 and may interact with Sequence 2042 in this patent.
HVGLPPREPV

SEQ ID NO: 2042 - protein, 10 aa, Homo Sapiens
  sequence located in GCK at 254-263 and may interact with Sequence 2041 in this patent.
VNTEWGAFGD

SEQ ID NO: 2043 - protein, 10 aa, Homo Sapiens
  sequence located in CNTFR at 104-113 and may interact with Sequence 2044 in this patent.
HVGLPPREPV

SEQ ID NO: 2044 - protein, 10 aa, Homo Sapiens
  sequence located in GCK at 253-262 and may interact with Sequence 2043 in this patent.
VNTEWGAFGD

SEQ ID NO: 2045 - protein, 10 aa, Homo Sapiens
  sequence located in CNTFR at 316-325 and may interact with Sequence 2046 in this patent.
AETTTSTTSS

SEQ ID NO: 2046 - protein, 10 aa, Homo Sapiens
  sequence located in EIF4H OR WBSCR1 OR WSCR1 at 14-23 and may interact with Sequence 2045 in this patent.
SFGGGRGSRG

SEQ ID NO: 2047 - protein, 10 aa, Homo Sapiens
  sequence located in CNTFR at 352-361 and may interact with Sequence 2048 in this patent.
VSVPITLALA

SEQ ID NO: 2048 - protein, 10 aa, Homo Sapiens
  sequence located in IK at 36-45 and may interact with Sequence 2047 in this patent.
DRDRDRERER

SEQ ID NO: 2049 - protein, 10 aa, Homo Sapiens
  sequence located in CNTFR at 319-328 and may interact with Sequence 2050 in this patent.
TTSTTSSLAP

SEQ ID NO: 2050 - protein, 10 aa, Homo Sapiens
  sequence located in IREB2 at 169-178 and may interact with Sequence 2049 in this patent.
RGQTTCRGSC

SEQ ID NO: 2051 - protein, 10 aa, Homo Sapiens
  sequence located in CNTFR at 316-325 and may interact with Sequence 2052 in this patent.
AETTTSTTSS

SEQ ID NO: 2052 - protein, 10 aa, Homo Sapiens
  sequence located in KRT9 at 473-482 and may interact with Sequence 2051 in this patent.
GLGGRGGSGG

SEQ ID NO: 2053 - protein, 10 aa, Homo Sapiens
  sequence located in CNTFR at 316-325 and may interact with Sequence 2054 in this patent.
AETTTSTTSS

SEQ ID NO: 2054 - protein, 10 aa, Homo Sapiens
  sequence located in KRT9 at 33-42 and may interact with Sequence 2053 in this patent.
RFSSSGGRGG

SEQ ID NO: 2055 - protein, 10 aa, Homo Sapiens
  sequence located in CNTFR at 314-323 and may interact with Sequence 2056 in this patent.
QAAETTTSTT

SEQ ID NO: 2056 - protein, 10 aa, Homo Sapiens
  sequence located in KRT9 at 133-142 and may interact with Sequence 2055 in this patent.
LGGFGGGAGG

SEQ ID NO: 2057 - protein, 10 aa, Homo Sapiens
  sequence located in CNTFR at 313-322 and may interact with Sequence 2058 in this patent.
AQAAETTTST

SEQ ID NO: 2058 - protein, 10 aa, Homo Sapiens
  sequence located in KRT9 at 132-141 and may interact with Sequence 2057 in this patent.
GLGGFGGGAG

SEQ ID NO: 2059 - protein, 10 aa, Homo Sapiens
  sequence located in CNTFR at 316-325 and may interact with Sequence 2060 in this patent.
AETTTSTTSS

SEQ ID NO: 2060 - protein, 10 aa, Homo Sapiens
  sequence located in KRT10 at 461-470 and may interact with Sequence 2059 in this patent.
GGGRGGGSFG

SEQ ID NO: 2061 - protein, 10 aa, Homo Sapiens
  sequence located in CNTFR at 316-325 and may interact with Sequence 2062 in this patent.
AETTTSTTSS

SEQ ID NO: 2062 - protein, 10 aa, Homo Sapiens
  sequence located in KRT10 at 59-68 and may interact with Sequence 2061 in this patent.
RGSSGGGCFG

SEQ ID NO: 2063 - protein, 10 aa, Homo Sapiens
  sequence located in CNTFR at 316-325 and may interact with Sequence 2064 in this patent.
AETTTSTTSS

SEQ ID NO: 2064 - protein, 10 aa, Homo Sapiens
  sequence located in KRT1 OR KRTA at 81-90 and may interact with Sequence 2063 in this patent.
RGGGRGSGFG

SEQ ID NO: 2065 - protein, 10 aa, Homo Sapiens
  sequence located in CNTFR at 319-328 and may interact with Sequence 2066 in this patent.
TTSTTSSLAP

SEQ ID NO: 2066 - protein, 10 aa, Homo Sapiens
  sequence located in KIF3B at 383-392 and may interact with Sequence 2065 in this patent.
RREGGGSGGG

SEQ ID NO: 2067 - protein, 10 aa, Homo Sapiens
  sequence located in CNTFR at 316-325 and may interact with Sequence 2068 in this patent.
AETTTSTTSS

SEQ ID NO: 2068 - protein, 10 aa, Homo Sapiens
  sequence located in Unknown at 237-246 and may interact with Sequence 2067 in this patent.
GGSGGSGCFS

SEQ ID NO: 2069 - protein, 10 aa, Homo Sapiens
  sequence located in CNTFR at 316-325 and may interact with Sequence 2070 in this patent.
AETTTSTTSS

SEQ ID NO: 2070 - protein, 10 aa, Homo Sapiens
  sequence located in Unknown at 60-69 and may interact with Sequence 2069 in this patent.
RFSSSTSGTT

SEQ ID NO: 2071 - protein, 10 aa, Homo Sapiens
  sequence located in CNTFR at 318-327 and may interact with Sequence 2072 in this patent.
TTTSTTSSLA

SEQ ID NO: 2072 - protein, 10 aa, Homo Sapiens
  sequence located in MN1 at 938-947 and may interact with Sequence 2071 in this patent.
GGRGRGRRKR

SEQ ID NO: 2073 - protein, 10 aa, Homo Sapiens
  sequence located in CNTFR at 316-325 and may interact with Sequence 2074 in this patent.
AETTTSTTSS

SEQ ID NO: 2074 - protein, 10 aa, Homo Sapiens
  sequence located in NCL at 664-673 and may interact with Sequence 2073 in this patent.
GGRGGRGGFG

SEQ ID NO: 2075 - protein, 10 aa, Homo Sapiens
  sequence located in CNTFR at 316-325 and may interact with Sequence 2076 in this patent.
AETTTSTTSS

SEQ ID NO: 2076 - protein, 10 aa, Homo Sapiens
  sequence located in NCL at 651-660 and may interact with Sequence 2075 in this patent.
GRGGGRGGFG

SEQ ID NO: 2077 - protein, 10 aa, Homo Sapiens
  sequence located in CNTFR at 316-325 and may interact with Sequence 2078 in this patent.
AETTTSTTSS

SEQ ID NO: 2078 - protein, 10 aa, Homo Sapiens
  sequence located in NCL at 658-667 and may interact with Sequence 2077 in this patent.
GFGGRGGGRG

SEQ ID NO: 2079 - protein, 10 aa, Homo Sapiens
  sequence located in CNTFR at 316-325 and may interact with Sequence 2080 in this patent.
AETTTSTTSS

SEQ ID NO: 2080 - protein, 10 aa, Homo Sapiens
  sequence located in NCL at 648-657 and may interact with Sequence 2079 in this patent.
GFGGRGGGRG

SEQ ID NO: 2081 - protein, 10 aa, Homo Sapiens
  sequence located in CNTFR at 318-327 and may interact with Sequence 2082 in this patent.
TTTSTTSSLA

SEQ ID NO: 2082 - protein, 10 aa, Homo Sapiens
  sequence located in RPL21 at 2-11 and may interact with Sequence 2081 in this patent.
SKRGRGGSSG

SEQ ID NO: 2083 - protein, 10 aa, Homo Sapiens
  sequence located in CNTFR at 318-327 and may interact with Sequence 2084 in this patent.
TTTSTTSSLA

SEQ ID NO: 2084 - protein, 10 aa, Homo Sapiens
  sequence located in HNRPF at 212-221 and may interact with Sequence 2083 in this patent.
SQRGRGGGSG

SEQ ID NO: 2085 - protein, 10 aa, Homo Sapiens
  sequence located in CNTFR at 319-328 and may interact with Sequence 2086 in this patent.
TTSTTSSLAP

SEQ ID NO: 2086 - protein, 10 aa, Homo Sapiens
  sequence located in HNRPF at 211-220 and may interact with Sequence 2085 in this patent.
GSQRGRGGGS

SEQ ID NO: 2087 - protein, 10 aa, Homo Sapiens
  sequence located in CNTFR at 314-323 and may interact with Sequence 2088 in this patent.
QAAETTTSTT

SEQ ID NO: 2088 - protein, 10 aa, Homo Sapiens
  sequence located in RORA OR NR1F1 OR RZRA at 47-56 and may interact with Sequence 2087 in this patent.
SSTCSSLSRL

SEQ ID NO: 2089 - protein, 10 aa, Homo Sapiens
  sequence located in CNTFR at 238-247 and may interact with Sequence 2090 in this patent.
FPLKFFLRYR

SEQ ID NO: 2090 - protein, 10 aa, Homo Sapiens
  sequence located in LAMR1 OR RPSA at 221-230 and may interact with Sequence 2089 in this patent.
AVTKEEFQGE

SEQ ID NO: 2091 - protein, 10 aa, Homo Sapiens
  sequence located in CNTFR at 337-346 and may interact with Sequence 2092 in this patent.
PGELGSGGGP

SEQ ID NO: 2092 - protein, 10 aa, Homo Sapiens
  sequence located in SG2NA at 50-59 and may interact with Sequence 2091 in this patent.
GPAAGPELSR

SEQ ID NO: 2093 - protein, 10 aa, Homo Sapiens
  sequence located in CNTFR at 338-347 and may interact with Sequence 2094 in this patent.
GELGSGGGPS

SEQ ID NO: 2094 - protein, 10 aa, Homo Sapiens
  sequence located in SG2NA at 49-58 and may interact with Sequence 2093 in this patent.
AGPAAGPELS

SEQ ID NO: 2095 - protein, 10 aa, Homo Sapiens
  sequence located in CNTFR at 339-348 and may interact with Sequence 2096 in this patent.
ELGSGGGPSA

SEQ ID NO: 2096 - protein, 10 aa, Homo Sapiens
  sequence located in SG2NA at 48-57 and may interact with Sequence 2095 in this patent.
GAGPAAGPEL

SEQ ID NO: 2097 - protein, 10 aa, Homo Sapiens
  sequence located in CNTFR at 183-192 and may interact with Sequence 2098 in this patent.
VSNALGHNAT

SEQ ID NO: 2098 - protein, 10 aa, Homo Sapiens
  sequence located in SNCA OR NACP at 64-73 and may interact with Sequence 2097 in this patent.
NAVSEAVVSS

SEQ ID NO: 2099 - protein, 10 aa, Homo Sapiens
  sequence located in CNTFR at 182-191 and may interact with Sequence 2100 in this patent.
SVSNALGHNA

SEQ ID NO: 2100 - protein, 10 aa, Homo Sapiens
  sequence located in SNCA OR NACP at 63-72 and may interact with Sequence 2099 in this patent.
ANAVSEAVVS

SEQ ID NO: 2101 - protein, 10 aa, Homo Sapiens
  sequence located in CNTFR at 323-332 and may interact with Sequence 2102 in this patent.
TSSLAPPPTT

SEQ ID NO: 2102 - protein, 10 aa, Homo Sapiens
  sequence located in KIAA0144 at 168-177 and may interact with Sequence 2101 in this patent.
RGTERGRRGR

SEQ ID NO: 2103 - protein, 10 aa, Homo Sapiens
  sequence located in CNTFR at 322-331 and may interact with Sequence 2104 in this patent.
TTSSLAPPPT

SEQ ID NO: 2104 - protein, 10 aa, Homo Sapiens
  sequence located in KIAA0144 at 167-176 and may interact with Sequence 2103 in this patent.
GRGTERGRRG

SEQ ID NO: 2105 - protein, 10 aa, Homo Sapiens
  sequence located in CNTFR at 313-322 and may interact with Sequence 2106 in this patent.
AQAAETTTST

SEQ ID NO: 2106 - protein, 10 aa, Homo Sapiens
  sequence located in HIVEP2 at 897-906 and may interact with Sequence 2105 in this patent.
SGSSSFSSLS

SEQ ID NO: 2107 - protein, 10 aa, Homo Sapiens
  sequence located in C6 at 272-281 and may interact with Sequence 2108 in this patent.
SSQGGSSFSV

SEQ ID NO: 2108 - protein, 10 aa, Homo Sapiens
  sequence located in Unknown at 300-309 and may interact with Sequence 2107 in this patent.
TGLAAGAKTY

SEQ ID NO: 2109 - protein, 10 aa, Homo Sapiens
  sequence located in C6 at 447-456 and may interact with Sequence 2110 in this patent.
GRSEYGAALA

SEQ ID NO: 2110 - protein, 10 aa, Homo Sapiens
  sequence located in MCF2L at 290-299 and may interact with Sequence 2109 in this patent.
SKCRTVLASP

SEQ ID NO: 2111 - protein, 10 aa, Homo Sapiens
  sequence located in C6 at 873-882 and may interact with Sequence 2112 in this patent.
CSASTSKCVC

SEQ ID NO: 2112 - protein, 10 aa, Homo Sapiens
  sequence located in DUSP6 OR PYST1 at 83-92 and may interact with Sequence 2111 in this patent.
RDRFTRRCGT

SEQ ID NO: 2113 - protein, 10 aa, Homo Sapiens
  sequence located in C6 at 568-577 and may interact with Sequence 2114 in this patent.
WGCWSSWSTC

SEQ ID NO: 2114 - protein, 10 aa, Homo Sapiens
  sequence located in DXS6673E at 798-807 and may interact with Sequence 2113 in this patent.
RSAPTAPTPP

SEQ ID NO: 2115 - protein, 10 aa, Homo Sapiens
  sequence located in C6 at 739-748 and may interact with Sequence 2116 in this patent.
AGPSRYTCQG

SEQ ID NO: 2116 - protein, 10 aa, Homo Sapiens
  sequence located in ELA2 at 699-708 and may interact with Sequence 2115 in this patent.
PLGGVAARPG

SEQ ID NO: 2117 - protein, 10 aa, Homo Sapiens
  sequence located in C6 at 447-456 and may interact with Sequence 2118 in this patent.
GRSEYGAALA

SEQ ID NO: 2118 - protein, 10 aa, Homo Sapiens
  sequence located in EDN3 at 16-25 and may interact with Sequence 2117 in this patent.
AAGFVPCSQS

SEQ ID NO: 2119 - protein, 10 aa, Homo Sapiens
  sequence located in C6 at 446-455 and may interact with Sequence 2120 in this patent.
GGRSEYGAAL

SEQ ID NO: 2120 - protein, 10 aa, Homo Sapiens
  sequence located in EDN3 at 15-24 and may interact with Sequence 2119 in this patent.
SAAGFVPCSQ

SEQ ID NO: 2121 - protein, 10 aa, Homo Sapiens
  sequence located in C6 at 445-454 and may interact with Sequence 2122 in this patent.
RGGRSEYGAA

SEQ ID NO: 2122 - protein, 10 aa, Homo Sapiens
  sequence located in EDN3 at 14-23 and may interact with Sequence 2121 in this patent.
TSAAGFVPCS

SEQ ID NO: 2123 - protein, 10 aa, Homo Sapiens
  sequence located in C6 at 531-540 and may interact with Sequence 2124 in this patent.
RPTLSGTECL

SEQ ID NO: 2124 - protein, 10 aa, Homo Sapiens
  sequence located in FSHB at 307-316 and may interact with Sequence 2123 in this patent.
TRGQRSSLAE

SEQ ID NO: 2125 - protein, 10 aa, Homo Sapiens
  sequence located in C6 at 540-549 and may interact with Sequence 2126 in this patent.
LCVCQSGTYG

SEQ ID NO: 2126 - protein, 10 aa, Homo Sapiens
  sequence located in HRG at 130-139 and may interact with Sequence 2125 in this patent.
SVSSALANTK

SEQ ID NO: 2127 - protein, 10 aa, Homo Sapiens
  sequence located in C6 at 580-589 and may interact with Sequence 2128 in this patent.
TYKRSRTREC

SEQ ID NO: 2128 - protein, 10 aa, Homo Sapiens
  sequence located in ITGB4 at 1480-1489 and may interact with Sequence 2127 in this patent.
RVLSTSSTLT

SEQ ID NO: 2129 - protein, 10 aa, Homo Sapiens
  sequence located in C6 at 445-454 and may interact with Sequence 2130 in this patent.
RGGRSEYGAA

SEQ ID NO: 2130 - protein, 10 aa, Homo Sapiens
  sequence located in KRT15 OR KRTB at 46-55 and may interact with Sequence 2129 in this patent.
ASSARFVSSG

SEQ ID NO: 2131 - protein, 10 aa, Homo Sapiens
  sequence located in C6 at 577-586 and may interact with Sequence 2132 in this patent.
CDATYKRSRT

SEQ ID NO: 2132 - protein, 10 aa, Homo Sapiens
  sequence located in KRT17 at 29-38 and may interact with Sequence 2131 in this patent.
RISSVLAGAS

SEQ ID NO: 2133 - protein, 10 aa, Homo Sapiens
  sequence located in C6 at 576-585 and may interact with Sequence 2134 in this patent.
TCDATYKRSR

SEQ ID NO: 2134 - protein, 10 aa, Homo Sapiens
  sequence located in KRT17 at 28-37 and may interact with Sequence 2133 in this patent.
SRISSVLAGA

SEQ ID NO: 2135 - protein, 10 aa, Homo Sapiens
  sequence located in C6 at 445-454 and may interact with Sequence 2136 in this patent.
RGGRSEYGAA

SEQ ID NO: 2136 - protein, 10 aa, Homo Sapiens
  sequence located in LDLR at 770-779 and may interact with Sequence 2135 in this patent.
SATSGLVPGG

SEQ ID NO: 2137 - protein, 10 aa, Homo Sapiens
  sequence located in C6 at 271-280 and may interact with Sequence 2138 in this patent.
FSSQGGSSFS

SEQ ID NO: 2138 - protein, 10 aa, Homo Sapiens
  sequence located in LAMB2 at 1650-1659 and may interact with Sequence 2137 in this patent.
ERALSSAGER

SEQ ID NO: 2139 - protein, 10 aa, Homo Sapiens
  sequence located in C6 at 270-279 and may interact with Sequence 2140 in this patent.
SFSSQGGSSF

SEQ ID NO: 2140 - protein, 10 aa, Homo Sapiens
  sequence located in LAMB2 at 1649-1658 and may interact with Sequence 2139 in this patent.
AERALSSAGE

SEQ ID NO: 2141 - protein, 10 aa, Homo Sapiens
  sequence located in C6 at 854-863 and may interact with Sequence 2142 in this patent.
SNSTKKESCG

SEQ ID NO: 2142 - protein, 10 aa, Homo Sapiens
  sequence located in MCM4 OR CDC21 at 352-361 and may interact with Sequence 2141 in this patent.
AIACLLFGGS

SEQ ID NO: 2143 - protein, 10 aa, Homo Sapiens
  sequence located in C6 at 739-748 and may interact with Sequence 2144 in this patent.
AGPSRYTCQG

SEQ ID NO: 2144 - protein, 10 aa, Homo Sapiens
  sequence located in MLR OR NR3C2 OR MCR at 588-597 and may interact with Sequence 2143 in this patent.
TLRSVSTGSS

SEQ ID NO: 2145 - protein, 10 aa, Homo Sapiens
  sequence located in C6 at 846-855 and may interact with Sequence 2146 in this patent.
GLERTRLSSN

SEQ ID NO: 2146 - protein, 10 aa, Homo Sapiens
  sequence located in MET at 692-701 and may interact with Sequence 2145 in this patent.
IGGKTCTLKS

SEQ ID NO: 2147 - protein, 10 aa, Homo Sapiens
  sequence located in C6 at 870-879 and may interact with Sequence 2148 in this patent.
WEKCSASTSK

SEQ ID NO: 2148 - protein, 10 aa, Homo Sapiens
  sequence located in MUC5AC OR MUC5 at 353-362 and may interact with Sequence 2147 in this patent.
LRCGGRALLP

SEQ ID NO: 2149 - protein, 10 aa, Homo Sapiens
  sequence located in C6 at 594-603 and may interact with Sequence 2150 in this patent.
PQRGGKRCEG

SEQ ID NO: 2150 - protein, 10 aa, Homo Sapiens
  sequence located in MYH10 at 235-244 and may interact with Sequence 2149 in this patent.
AFGTLSPSLG

SEQ ID NO: 2151 - protein, 10 aa, Homo Sapiens
  sequence located in C6 at 875-884 and may interact with Sequence 2152 in this patent.
ASTSKCVCLL

SEQ ID NO: 2152 - protein, 10 aa, Homo Sapiens
  sequence located in NK4 at 121-130 and may interact with Sequence 2151 in this patent.
KERDGLRCRG

SEQ ID NO: 2153 - protein, 10 aa, Homo Sapiens
  sequence located in C6 at 364-373 and may interact with Sequence 2154 in this patent.
HYFTSGSLGG

SEQ ID NO: 2154 - protein, 10 aa, Homo Sapiens
  sequence located in NNT at 90-99 and may interact with Sequence 2153 in this patent.
VVESGAGEAS

SEQ ID NO: 2155 - protein, 10 aa, Homo Sapiens
  sequence located in C6 at 568-577 and may interact with Sequence 2156 in this patent.
WGCWSSWSTC

SEQ ID NO: 2156 - protein, 10 aa, Homo Sapiens
  sequence located in OA1 at 51-60 and may interact with Sequence 2155 in this patent.
GRRPAGPGSP

SEQ ID NO: 2157 - protein, 10 aa, Homo Sapiens
  sequence located in C6 at 39-48 and may interact with Sequence 2158 in this patent.
CNSGTQSRHR

SEQ ID NO: 2158 - protein, 10 aa, Homo Sapiens
  sequence located in POU2F2 OR OTF2 OR OCT2 at 398-407 and may interact with Sequence 2157 in this patent.
TVTTLSSAVG

SEQ ID NO: 2159 - protein, 10 aa, Homo Sapiens
  sequence located in C6 at 577-586 and may interact with Sequence 2160 in this patent.
CDATYKRSRT

SEQ ID NO: 2160 - protein, 10 aa, Homo Sapiens
  sequence located in PDHA1 OR PHE1A at 7-16 and may interact with Sequence 2159 in this patent.
AVSRVLSGAS

SEQ ID NO: 2161 - protein, 10 aa, Homo Sapiens
  sequence located in C6 at 599-608 and may interact with Sequence 2162 in this patent.
KRCEGEKRQE

SEQ ID NO: 2162 - protein, 10 aa, Homo Sapiens
  sequence located in BGLAP at 6-15 and may interact with Sequence 2161 in this patent.
LLALLALAAL

SEQ ID NO: 2163 - protein, 10 aa, Homo Sapiens
  sequence located in C6 at 582-591 and may interact with Sequence 2164 in this patent.
KRSRTRECNN

SEQ ID NO: 2164 - protein, 10 aa, Homo Sapiens
  sequence located in AGC1 OR CSPG1 at 158-167 and may interact with Sequence 2163 in this patent.
IVGFTRSAAL

SEQ ID NO: 2165 - protein, 10 aa, Homo Sapiens
  sequence located in C6 at 583-592 and may interact with Sequence 2166 in this patent.
RSRTRECNNP

SEQ ID NO: 2166 - protein, 10 aa, Homo Sapiens
  sequence located in AGC1 OR CSPG1 at 157-166 and may interact with Sequence 2165 in this patent.
GIVGFTRSAA

SEQ ID NO: 2167 - protein, 10 aa, Homo Sapiens
  sequence located in C6 at 741-750 and may interact with Sequence 2168 in this patent.
PSRYTCQGNS

SEQ ID NO: 2168 - protein, 10 aa, Homo Sapiens
  sequence located in PMEL17 OR D12S53E at 164-173 and may interact with Sequence 2167 in this patent.
GGPVSGLSIG

SEQ ID NO: 2169 - protein, 10 aa, Homo Sapiens
  sequence located in C6 at 873-882 and may interact with Sequence 2170 in this patent.
CSASTSKCVC

SEQ ID NO: 2170 - protein, 10 aa, Homo Sapiens
  sequence located in PSF at 3-12 and may interact with Sequence 2169 in this patent.
RDRFRSRGGG

SEQ ID NO: 2171 - protein, 10 aa, Homo Sapiens
  sequence located in C6 at 852-861 and may interact with Sequence 2172 in this patent.
LSSNSTKKES

SEQ ID NO: 2172 - protein, 10 aa, Homo Sapiens
  sequence located in P at 568-577 and may interact with Sequence 2171 in this patent.
ETAVRRLLLG

SEQ ID NO: 2173 - protein, 10 aa, Homo Sapiens
  sequence located in C6 at 145-154 and may interact with Sequence 2174 in this patent.
RCDSGRCIAR

SEQ ID NO: 2174 - protein, 10 aa, Homo Sapiens
  sequence located in RFP at 303-312 and may interact with Sequence 2173 in this patent.
ASYTASAIRS

SEQ ID NO: 2175 - protein, 10 aa, Homo Sapiens
  sequence located in C6 at 271-280 and may interact with Sequence 2176 in this patent.
FSSQGGSSFS

SEQ ID NO: 2176 - protein, 10 aa, Homo Sapiens
  sequence located in RRM1 OR RR1 at 61-70 and may interact with Sequence 2175 in this patent.
AETAATLTTK

SEQ ID NO: 2177 - protein, 10 aa, Homo Sapiens
  sequence located in C6 at 532-541 and may interact with Sequence 2178 in this patent.
PTLSGTECLC

SEQ ID NO: 2178 - protein, 10 aa, Homo Sapiens
  sequence located in RPP14 at 73-82 and may interact with Sequence 2177 in this patent.
AKGLSARQRR

SEQ ID NO: 2179 - protein, 10 aa, Homo Sapiens
  sequence located in C6 at 370-379 and may interact with Sequence 2180 in this patent.
SLGGVYDLLY

SEQ ID NO: 2180 - protein, 10 aa, Homo Sapiens
  sequence located in POLR3A at 1070-1079 and may interact with Sequence 2179 in this patent.
IKEIINASKA

SEQ ID NO: 2181 - protein, 10 aa, Homo Sapiens
  sequence located in C6 at 695-704 and may interact with Sequence 2182 in this patent.
GDVECQRTEC

SEQ ID NO: 2182 - protein, 10 aa, Homo Sapiens
  sequence located in Unknown at 19-28 and may interact with Sequence 2181 in this patent.
ALGALALYVA

SEQ ID NO: 2183 - protein, 10 aa, Homo Sapiens
  sequence located in C6 at 853-862 and may interact with Sequence 2184 in this patent.
SSNSTKKESC

SEQ ID NO: 2184 - protein, 10 aa, Homo Sapiens
  sequence located in SLC5A1 OR SGLT1 at 53-62 and may interact with Sequence 2183 in this patent.
GTVGGFFLAG

SEQ ID NO: 2185 - protein, 10 aa, Homo Sapiens
  sequence located in C6 at 148-157 and may interact with Sequence 2186 in this patent.
SGRCIARKLE

SEQ ID NO: 2186 - protein, 10 aa, Homo Sapiens
  sequence located in IGHMBP2 OR SMUBP2 OR SMBP2 at 354-363 and may interact with Sequence 2185 in this patent.
GASADGPLKL

SEQ ID NO: 2187 - protein, 10 aa, Homo Sapiens
  sequence located in C6 at 848-857 and may interact with Sequence 2188 in this patent.
ERTRLSSNST

SEQ ID NO: 2188 - protein, 10 aa, Homo Sapiens
  sequence located in SPTB2 at 1078-1087 and may interact with Sequence 2187 in this patent.
LSRTQTAIAS

SEQ ID NO: 2189 - protein, 10 aa, Homo Sapiens
  sequence located in C6 at 499-508 and may interact with Sequence 2190 in this patent.
CAVTKRNNLR

SEQ ID NO: 2190 - protein, 10 aa, Homo Sapiens
  sequence located in TDPX1 OR NKEFB at 53-62 and may interact with Sequence 2189 in this patent.
TEIIAFSNRA

SEQ ID NO: 2191 - protein, 10 aa, Homo Sapiens
  sequence located in C6 at 499-508 and may interact with Sequence 2192 in this patent.
CAVTKRNNLR

SEQ ID NO: 2192 - protein, 10 aa, Homo Sapiens
  sequence located in TDPX2 OR PAGB OR PAGA at 54-63 and may interact with Sequence 2191 in this patent.
TEIIAFSDRA

SEQ ID NO: 2193 - protein, 10 aa, Homo Sapiens
  sequence located in C6 at 222-231 and may interact with Sequence 2194 in this patent.
KSSRTSNPYR

SEQ ID NO: 2194 - protein, 10 aa, Homo Sapiens
  sequence located in WIT1 OR WIT-1 at 38-47 and may interact with Sequence 2193 in this patent.
LGRSRAVRIS

SEQ ID NO: 2195 - protein, 10 aa, Homo Sapiens
  sequence located in C6 at 579-588 and may interact with Sequence 2196 in this patent.
ATYKRSRTRE

SEQ ID NO: 2196 - protein, 10 aa, Homo Sapiens
  sequence located in KIAA0411 at 383-392 and may interact with Sequence 2195 in this patent.
LSGSATLVSS

SEQ ID NO: 2197 - protein, 10 aa, Homo Sapiens
  sequence located in C6 at 580-589 and may interact with Sequence 2198 in this patent.
TYKRSRTREC

SEQ ID NO: 2198 - protein, 10 aa, Homo Sapiens
  sequence located in KIAA0411 at 382-391 and may interact with Sequence 2197 in this patent.
ALSGSATLVS

SEQ ID NO: 2199 - protein, 10 aa, Homo Sapiens
  sequence located in C6 at 446-455 and may interact with Sequence 2200 in this patent.
GGRSEYGAAL

SEQ ID NO: 2200 - protein, 10 aa, Homo Sapiens
  sequence located in ZNF141 at 231-240 and may interact with Sequence 2199 in this patent.
ECGSIFTTSS

SEQ ID NO: 2201 - protein, 10 aa, Homo Sapiens
  sequence located in C7 at 665-674 and may interact with Sequence 2202 in this patent.
LEGPSAFLCG

SEQ ID NO: 2202 - protein, 10 aa, Homo Sapiens
  sequence located in CPA2 at 97-106 and may interact with Sequence 2201 in this patent.
EFSGRGEQAT

SEQ ID NO: 2203 - protein, 10 aa, Homo Sapiens
  sequence located in C7 at 470-479 and may interact with Sequence 2204 in this patent.
GTHCLCHCKP

SEQ ID NO: 2204 - protein, 10 aa, Homo Sapiens
  sequence located in POLD1 OR POLD at 766-775 and may interact with Sequence 2203 in this patent.
SSVAEAMALG

SEQ ID NO: 2205 - protein, 10 aa, Homo Sapiens
  sequence located in C7 at 378-387 and may interact with Sequence 2206 in this patent.
RGGGAGFISG

SEQ ID NO: 2206 - protein, 10 aa, Homo Sapiens
  sequence located in DRPLA at 650-659 and may interact with Sequence 2205 in this patent.
PGYKPGSPPS

SEQ ID NO: 2207 - protein, 10 aa, Homo Sapiens
  sequence located in C7 at 89-98 and may interact with Sequence 2208 in this patent.
FRCFSGQCIS

SEQ ID NO: 2208 - protein, 10 aa, Homo Sapiens
  sequence located in DXS6673E at 223-232 and may interact with Sequence 2207 in this patent.
GDGLTAKASE

SEQ ID NO: 2209 - protein, 10 aa, Homo Sapiens
  sequence located in C7 at 501-510 and may interact with Sequence 2210 in this patent.
GGWSCWSSWS

SEQ ID NO: 2210 - protein, 10 aa, Homo Sapiens
  sequence located in E2F1 OR RBBP3 at 47-56 and may interact with Sequence 2209 in this patent.
APTGPAAPAA

SEQ ID NO: 2211 - protein, 10 aa, Homo Sapiens
  sequence located in C7 at 501-510 and may interact with Sequence 2212 in this patent.
GGWSCWSSWS

SEQ ID NO: 2212 - protein, 10 aa, Homo Sapiens
  sequence located in E2F1 OR RBBP3 at 46-55 and may interact with Sequence 2211 in this patent.
PAPTGPAAPA

SEQ ID NO: 2213 - protein, 10 aa, Homo Sapiens
  sequence located in C7 at 140-149 and may interact with Sequence 2214 in this patent.
TGNGYNELTG

SEQ ID NO: 2214 - protein, 10 aa, Homo Sapiens
  sequence located in EPHB4 OR HTK at 212-221 and may interact with Sequence 2213 in this patent.
PRELVVPVAG

SEQ ID NO: 2215 - protein, 10 aa, Homo Sapiens
  sequence located in C7 at 771-780 and may interact with Sequence 2216 in this patent.
KACGACPLWG

SEQ ID NO: 2216 - protein, 10 aa, Homo Sapiens
  sequence located in EPIM at 415-424 and may interact with Sequence 2215 in this patent.
SPEGASAASF

SEQ ID NO: 2217 - protein, 10 aa, Homo Sapiens
  sequence located in C7 at 503-512 and may interact with Sequence 2218 in this patent.
WSCWSSWSPC

SEQ ID NO: 2218 - protein, 10 aa, Homo Sapiens
  sequence located in EWSR1 OR EWS at 471-480 and may interact with Sequence 2217 in this patent.
RGGPGGPGGP

SEQ ID NO: 2219 - protein, 10 aa, Homo Sapiens
  sequence located in C7 at 702-711 and may interact with Sequence 2220 in this patent.
CQRWEKLQNS

SEQ ID NO: 2220 - protein, 10 aa, Homo Sapiens
  sequence located in FBN1 OR FBN at 2776-2785 and may interact with Sequence 2219 in this patent.
RILELLPALT

SEQ ID NO: 2221 - protein, 10 aa, Homo Sapiens
  sequence located in C7 at 787-796 and may interact with Sequence 2222 in this patent.
SKCVCREASE

SEQ ID NO: 2222 - protein, 10 aa, Homo Sapiens
  sequence located in GARP at 161-170 and may interact with Sequence 2221 in this patent.
LTRLTRHTFR

SEQ ID NO: 2223 - protein, 10 aa, Homo Sapiens
  sequence located in C7 at 769-778 and may interact with Sequence 2224 in this patent.
AEKACGACPL

SEQ ID NO: 2224 - protein, 10 aa, Homo Sapiens
  sequence located in GNA15 OR GNA16 at 332-341 and may interact with Sequence 2223 in this patent.
KGARSRRLFS

SEQ ID NO: 2225 - protein, 10 aa, Homo Sapiens
  sequence located in C7 at 820-829 and may interact with Sequence 2226 in this patent.
AGALRCRGQS

SEQ ID NO: 2226 - protein, 10 aa, Homo Sapiens
  sequence located in IGHG4 at 17-26 and may interact with Sequence 2225 in this patent.
STSESTAALG

SEQ ID NO: 2227 - protein, 10 aa, Homo Sapiens
  sequence located in C7 at 41-50 and may interact with Sequence 2228 in this patent.
GCTKTQTRRR

SEQ ID NO: 2228 - protein, 10 aa, Homo Sapiens
  sequence located in SHMT2 at 421-430 and may interact with Sequence 2227 in this patent.
PGGLRLGAPA

SEQ ID NO: 2229 - protein, 10 aa, Homo Sapiens
  sequence located in C7 at 540-549 and may interact with Sequence 2230 in this patent.
TESTQCEDEE

SEQ ID NO: 2230 - protein, 10 aa, Homo Sapiens
  sequence located in GZMB OR CTLA1 OR GRB OR CSPB OR CGL1 at 8-17 and may interact with Sequence 2229 in this patent.
LLVLALGALS

SEQ ID NO: 2231 - protein, 10 aa, Homo Sapiens
  sequence located in C7 at 501-510 and may interact with Sequence 2232 in this patent.
GGWSCWSSWS

SEQ ID NO: 2232 - protein, 10 aa, Homo Sapiens
  sequence located in H1F4 at 4-13 and may interact with Sequence 2231 in this patent.
APAAPAAPAP

SEQ ID NO: 2233 - protein, 10 aa, Homo Sapiens
  sequence located in C7 at 501-510 and may interact with Sequence 2234 in this patent.
GGWSCWSSWS

SEQ ID NO: 2234 - protein, 10 aa, Homo Sapiens
  sequence located in H1F4 at 3-12 and may interact with Sequence 2233 in this patent.
TAPAAPAAPA

SEQ ID NO: 2235 - protein, 10 aa, Homo Sapiens
  sequence located in C7 at 42-51 and may interact with Sequence 2236 in this patent.
CTKTQTRRRS

SEQ ID NO: 2236 - protein, 10 aa, Homo Sapiens
  sequence located in HRK OR BID3 at 21-30 and may interact with Sequence 2235 in this patent.
GRLGLRSSAA

SEQ ID NO: 2237 - protein, 10 aa, Homo Sapiens
  sequence located in C7 at 41-50 and may interact with Sequence 2238 in this patent.
GCTKTQTRRR

SEQ ID NO: 2238 - protein, 10 aa, Homo Sapiens
  sequence located in HRK OR BID3 at 20-29 and may interact with Sequence 2237 in this patent.
AGRLGLRSSA

SEQ ID NO: 2239 - protein, 10 aa, Homo Sapiens
  sequence located in C7 at 72-81 and may interact with Sequence 2240 in this patent.
SCEPTRGCPT

SEQ ID NO: 2240 - protein, 10 aa, Homo Sapiens
  sequence located in HOXA9 OR HOX1G at 358-367 and may interact with Sequence 2239 in this patent.
RRRPPRWLAA

SEQ ID NO: 2241 - protein, 10 aa, Homo Sapiens
  sequence located in C7 at 46-55 and may interact with Sequence 2242 in this patent.
QTRRRSVAVY

SEQ ID NO: 2242 - protein, 10 aa, Homo Sapiens
  sequence located in GCK at 358-367 and may interact with Sequence 2241 in this patent.
LRPSTTDCDI

SEQ ID NO: 2243 - protein, 10 aa, Homo Sapiens
  sequence located in C7 at 45-54 and may interact with Sequence 2244 in this patent.
TQTRRRSVAV

SEQ ID NO: 2244 - protein, 10 aa, Homo Sapiens
  sequence located in GCK at 357-366 and may interact with Sequence 2243 in this patent.
GLRPSTTDCD

SEQ ID NO: 2245 - protein, 10 aa, Homo Sapiens
  sequence located in C7 at 44-53 and may interact with Sequence 2246 in this patent.
KTQTRRRSVA

SEQ ID NO: 2246 - protein, 10 aa, Homo Sapiens
  sequence located in GCK at 356-365 and may interact with Sequence 2245 in this patent.
LGLRPSTTDC

SEQ ID NO: 2247 - protein, 10 aa, Homo Sapiens
  sequence located in C7 at 46-55 and may interact with Sequence 2248 in this patent.
QTRRRSVAVY

SEQ ID NO: 2248 - protein, 10 aa, Homo Sapiens
  sequence located in GCK at 357-366 and may interact with Sequence 2247 in this patent.
LRPSTTDCDI

SEQ ID NO: 2249 - protein, 10 aa, Homo Sapiens
  sequence located in C7 at 45-54 and may interact with Sequence 2250 in this patent.
TQTRRRSVAV

SEQ ID NO: 2250 - protein, 10 aa, Homo Sapiens
  sequence located in GCK at 356-365 and may interact with Sequence 2249 in this patent.
GLRPSTTDCD

SEQ ID NO: 2251 - protein, 10 aa, Homo Sapiens
  sequence located in C7 at 44-53 and may interact with Sequence 2252 in this patent.
KTQTRRRSVA

SEQ ID NO: 2252 - protein, 10 aa, Homo Sapiens
  sequence located in GCK at 355-364 and may interact with Sequence 2251 in this patent.
LGLRPSTTDC

SEQ ID NO: 2253 - protein, 10 aa, Homo Sapiens
  sequence located in C7 at 230-239 and may interact with Sequence 2254 in this patent.
SSSRSYTSHT

SEQ ID NO: 2254 - protein, 10 aa, Homo Sapiens
  sequence located in ITBA2 at 11-20 and may interact with Sequence 2253 in this patent.
GMAGVATAAA

SEQ ID NO: 2255 - protein, 10 aa, Homo Sapiens
  sequence located in C7 at 533-542 and may interact with Sequence 2256 in this patent.
RSCVGETTES

SEQ ID NO: 2256 - protein, 10 aa, Homo Sapiens
  sequence located in INHA at 63-72 and may interact with Sequence 2255 in this patent.
ALGGFTHRGS

SEQ ID NO: 2257 - protein, 10 aa, Homo Sapiens
  sequence located in C7 at 533-542 and may interact with Sequence 2258 in this patent.
RSCVGETTES

SEQ ID NO: 2258 - protein, 10 aa, Homo Sapiens
  sequence located in INHA at 59-68 and may interact with Sequence 2257 in this patent.
PRRHALGGFT

SEQ ID NO: 2259 - protein, 10 aa, Homo Sapiens
  sequence located in C7 at 525-534 and may interact with Sequence 2260 in this patent.
NPPPSGGGRS

SEQ ID NO: 2260 - protein, 10 aa, Homo Sapiens
  sequence located in IL11 at 162-171 and may interact with Sequence 2259 in this patent.
APPSSAWGGI

SEQ ID NO: 2261 - protein, 10 aa, Homo Sapiens
  sequence located in C7 at 323-332 and may interact with Sequence 2262 in this patent.
KLKQNDFNSV

SEQ ID NO: 2262 - protein, 10 aa, Homo Sapiens
  sequence located in IL1RA OR IL1R1 OR IL1R at 481-490 and may interact with Sequence 2261 in this patent.
DGIKVVLLEL

SEQ ID NO: 2263 - protein, 10 aa, Homo Sapiens
  sequence located in C7 at 466-475 and may interact with Sequence 2264 in this patent.
ATVEGTHCLC

SEQ ID NO: 2264 - protein, 10 aa, Homo Sapiens
  sequence located in IRF7 at 467-476 and may interact with Sequence 2263 in this patent.
REGVSSLDSS

SEQ ID NO: 2265 - protein, 10 aa, Homo Sapiens
  sequence located in C7 at 379-388 and may interact with Sequence 2266 in this patent.
GGGAGFISGL

SEQ ID NO: 2266 - protein, 10 aa, Homo Sapiens
  sequence located in ITGA8 at 842-851 and may interact with Sequence 2265 in this patent.
PAASPEDTPE

SEQ ID NO: 2267 - protein, 10 aa, Homo Sapiens
  sequence located in C7 at 72-81 and may interact with Sequence 2268 in this patent.
SCEPTRGCPT

SEQ ID NO: 2268 - protein, 10 aa, Homo Sapiens
  sequence located in KRT9 at 94-103 and may interact with Sequence 2267 in this patent.
RGFGGASGGG

SEQ ID NO: 2269 - protein, 10 aa, Homo Sapiens
  sequence located in C7 at 72-81 and may interact with Sequence 2270 in this patent.
SCEPTRGCPT

SEQ ID NO: 2270 - protein, 10 aa, Homo Sapiens
  sequence located in KRT2E at 83-92 and may interact with Sequence 2269 in this patent.
GGRSSCGFAG

SEQ ID NO: 2271 - protein, 10 aa, Homo Sapiens
  sequence located in C7 at 529-538 and may interact with Sequence 2272 in this patent.
SGGGRSCVGE

SEQ ID NO: 2272 - protein, 10 aa, Homo Sapiens
  sequence located in NFKB2 at 453-462 and may interact with Sequence 2271 in this patent.
LAHAAPSPTR

SEQ ID NO: 2273 - protein, 10 aa, Homo Sapiens
  sequence located in C7 at 530-539 and may interact with Sequence 2274 in this patent.
GGGRSCVGET

SEQ ID NO: 2274 - protein, 10 aa, Homo Sapiens
  sequence located in NFKB2 at 452-461 and may interact with Sequence 2273 in this patent.
GLAHAAPSPT

SEQ ID NO: 2275 - protein, 10 aa, Homo Sapiens
  sequence located in C7 at 72-81 and may interact with Sequence 2276 in this patent.
SCEPTRGCPT

SEQ ID NO: 2276 - protein, 10 aa, Homo Sapiens
  sequence located in KLK2 at 308-317 and may interact with Sequence 2275 in this patent.
GWAAAGGFGG

SEQ ID NO: 2277 - protein, 10 aa, Homo Sapiens
  sequence located in C7 at 73-82 and may interact with Sequence 2278 in this patent.
CEPTRGCPTE

SEQ ID NO: 2278 - protein, 10 aa, Homo Sapiens
  sequence located in KLK2 at 307-316 and may interact with Sequence 2277 in this patent.
LGWAAAGGFG

SEQ ID NO: 2279 - protein, 10 aa, Homo Sapiens
  sequence located in C7 at 785-794 and may interact with Sequence 2280 in this patent.
ESSKCVCREA

SEQ ID NO: 2280 - protein, 10 aa, Homo Sapiens
  sequence located in KLK2 at 513-522 and may interact with Sequence 2279 in this patent.
LRALGHGAFG

SEQ ID NO: 2281 - protein, 10 aa, Homo Sapiens
  sequence located in C7 at 792-801 and may interact with Sequence 2282 in this patent.
REASECEEEG

SEQ ID NO: 2282 - protein, 10 aa, Homo Sapiens
  sequence located in LDC at 2-11 and may interact with Sequence 2281 in this patent.
SLSAFTLFLA

SEQ ID NO: 2283 - protein, 10 aa, Homo Sapiens
  sequence located in C7 at 824-833 and may interact with Sequence 2284 in this patent.
RCRGQSISVT

SEQ ID NO: 2284 - protein, 10 aa, Homo Sapiens
  sequence located in MAP1B at 1219-1228 and may interact with Sequence 2283 in this patent.
SRSALRDAYC

SEQ ID NO: 2285 - protein, 10 aa, Homo Sapiens
  sequence located in C7 at 671-680 and may interact with Sequence 2286 in this patent.
FLCGSSLKWS

SEQ ID NO: 2286 - protein, 10 aa, Homo Sapiens
  sequence located in MCM2 OR CDCL1 OR BM28 at 206-215 and may interact with Sequence 2285 in this patent.
EKAPAGQLPR

SEQ ID NO: 2287 - protein, 10 aa, Homo Sapiens
  sequence located in C7 at 530-539 and may interact with Sequence 2288 in this patent.
GGGRSCVGET

SEQ ID NO: 2288 - protein, 10 aa, Homo Sapiens
  sequence located in MEOX2 OR MOX2 OR GAX at 99-108 and may interact with Sequence 2287 in this patent.
PPSAARHSLC

SEQ ID NO: 2289 - protein, 10 aa, Homo Sapiens
  sequence located in C7 at 530-539 and may interact with Sequence 2290 in this patent.
GGGRSCVGET

SEQ ID NO: 2290 - protein, 10 aa, Homo Sapiens
  sequence located in MUC2 OR SMUC at 4260-4269 and may interact with Sequence 2289 in this patent.
TTTSGGHTLS

SEQ ID NO: 2291 - protein, 10 aa, Homo Sapiens
  sequence located in C7 at 525-534 and may interact with Sequence 2292 in this patent.
NPPPSGGGRS

SEQ ID NO: 2292 - protein, 10 aa, Homo Sapiens
  sequence located in MYH10 at 1202-1211 and may interact with Sequence 2291 in this patent.
TPATSAGGGI

SEQ ID NO: 2293 - protein, 10 aa, Homo Sapiens
  sequence located in C7 at 816-825 and may interact with Sequence 2294 in this patent.
SECEAGALRC

SEQ ID NO: 2294 - protein, 10 aa, Homo Sapiens
  sequence located in Unknown at 164-173 and may interact with Sequence 2293 in this patent.
TSQGTSFTFG

SEQ ID NO: 2295 - protein, 10 aa, Homo Sapiens
  sequence located in C7 at 530-539 and may interact with Sequence 2296 in this patent.
GGGRSCVGET

SEQ ID NO: 2296 - protein, 10 aa, Homo Sapiens
  sequence located in SLC13A2 OR NADC1 at 583-592 and may interact with Sequence 2295 in this patent.
SLANTTTPSP

SEQ ID NO: 2297 - protein, 10 aa, Homo Sapiens
  sequence located in C7 at 820-829 and may interact with Sequence 2298 in this patent.
AGALRCRGQS

SEQ ID NO: 2298 - protein, 10 aa, Homo Sapiens
  sequence located in NMA at 331-340 and may interact with Sequence 2297 in this patent.
RPSKPTPSLG

SEQ ID NO: 2299 - protein, 10 aa, Homo Sapiens
  sequence located in C7 at 423-432 and may interact with Sequence 2300 in this patent.
PLYELVKEVP

SEQ ID NO: 2300 - protein, 10 aa, Homo Sapiens
  sequence located in OXTR at 334-343 and may interact with Sequence 2299 in this patent.
GHLFHELVQR

SEQ ID NO: 2301 - protein, 10 aa, Homo Sapiens
  sequence located in C7 at 424-433 and may interact with Sequence 2302 in this patent.
LYELVKEVPC

SEQ ID NO: 2302 - protein, 10 aa, Homo Sapiens
  sequence located in OXTR at 333-342 and may interact with Sequence 2301 in this patent.
TGHLFHELVQ

SEQ ID NO: 2303 - protein, 10 aa, Homo Sapiens
  sequence located in C7 at 499-508 and may interact with Sequence 2304 in this patent.
VDGGWSCWSS

SEQ ID NO: 2304 - protein, 10 aa, Homo Sapiens
  sequence located in P4HA at 687-696 and may interact with Sequence 2303 in this patent.
NVSSPATPTA

SEQ ID NO: 2305 - protein, 10 aa, Homo Sapiens
  sequence located in C7 at 498-507 and may interact with Sequence 2306 in this patent.
GVDGGWSCWS

SEQ ID NO: 2306 - protein, 10 aa, Homo Sapiens
  sequence located in P4HA at 686-695 and may interact with Sequence 2305 in this patent.
SNVSSPATPT

SEQ ID NO: 2307 - protein, 10 aa, Homo Sapiens
  sequence located in C7 at 77-86 and may interact with Sequence 2308 in this patent.
RGCPTEEGCG

SEQ ID NO: 2308 - protein, 10 aa, Homo Sapiens
  sequence located in PRELP at 62-71 and may interact with Sequence 2307 in this patent.
SGSLLSGASA

SEQ ID NO: 2309 - protein, 10 aa, Homo Sapiens
  sequence located in C7 at 767-776 and may interact with Sequence 2310 in this patent.
ASAEKACGAC

SEQ ID NO: 2310 - protein, 10 aa, Homo Sapiens
  sequence located in PRELP at 62-71 and may interact with Sequence 2309 in this patent.
SGSLLSGASA

SEQ ID NO: 2311 - protein, 10 aa, Homo Sapiens
  sequence located in C7 at 787-796 and may interact with Sequence 2312 in this patent.
SKCVCREASE

SEQ ID NO: 2312 - protein, 10 aa, Homo Sapiens
  sequence located in PLXN4 OR SEX at 17-26 and may interact with Sequence 2311 in this patent.
ALGNRPFRAF

SEQ ID NO: 2313 - protein, 10 aa, Homo Sapiens
  sequence located in C7 at 786-795 and may interact with Sequence 2314 in this patent.
SSKCVCREAS

SEQ ID NO: 2314 - protein, 10 aa, Homo Sapiens
  sequence located in PLXN4 OR SEX at 16-25 and may interact with Sequence 2313 in this patent.
GALGNRPFRA

SEQ ID NO: 2315 - protein, 10 aa, Homo Sapiens
  sequence located in C7 at 564-573 and may interact with Sequence 2316 in this patent.
SLVPTEFCPS

SEQ ID NO: 2316 - protein, 10 aa, Homo Sapiens
  sequence located in PMX1 at 145-154 and may interact with Sequence 2315 in this patent.
RRAKFRRNER

SEQ ID NO: 2317 - protein, 10 aa, Homo Sapiens
  sequence located in C7 at 564-573 and may interact with Sequence 2318 in this patent.
SLVPTEFCPS

SEQ ID NO: 2318 - protein, 10 aa, Homo Sapiens
  sequence located in PMX2 OR PRX2 at 66-75 and may interact with Sequence 2317 in this patent.
RRAKFRRNER

SEQ ID NO: 2319 - protein, 10 aa, Homo Sapiens
  sequence located in C7 at 166-175 and may interact with Sequence 2320 in this patent.
RKVFSGDGKD

SEQ ID NO: 2320 - protein, 10 aa, Homo Sapiens
  sequence located in PSMB1 OR PSC5 at 40-49 and may interact with Sequence 2319 in this patent.
ILAIAGEDFA

SEQ ID NO: 2321 - protein, 10 aa, Homo Sapiens
  sequence located in C7 at 529-538 and may interact with Sequence 2322 in this patent.
SGGGRSCVGE

SEQ ID NO: 2322 - protein, 10 aa, Homo Sapiens
  sequence located in RAD23A at 267-276 and may interact with Sequence 2321 in this patent.
TTTSSGGHPL

SEQ ID NO: 2323 - protein, 10 aa, Homo Sapiens
  sequence located in C7 at 784-793 and may interact with Sequence 2324 in this patent.
AESSKCVCRE

SEQ ID NO: 2324 - protein, 10 aa, Homo Sapiens
  sequence located in RRAD OR RAD at 366-375 and may interact with Sequence 2323 in this patent.
CLGRFGNTPF

SEQ ID NO: 2325 - protein, 10 aa, Homo Sapiens
  sequence located in C7 at 532-541 and may interact with Sequence 2326 in this patent.
GRSCVGETTE

SEQ ID NO: 2326 - protein, 10 aa, Homo Sapiens
  sequence located in RBL2 OR RB2 at 363-372 and may interact with Sequence 2325 in this patent.
STATHSLSRL

SEQ ID NO: 2327 - protein, 10 aa, Homo Sapiens
  sequence located in C7 at 85-94 and may interact with Sequence 2328 in this patent.
CGERFRCFSG

SEQ ID NO: 2328 - protein, 10 aa, Homo Sapiens
  sequence located in RELB at 157-166 and may interact with Sequence 2327 in this patent.
STEASKTLPA

SEQ ID NO: 2329 - protein, 10 aa, Homo Sapiens
  sequence located in C7 at 72-81 and may interact with Sequence 2330 in this patent.
SCEPTRGCPT

SEQ ID NO: 2330 - protein, 10 aa, Homo Sapiens
  sequence located in RET at 532-541 and may interact with Sequence 2329 in this patent.
GGLGSPTGRC

SEQ ID NO: 2331 - protein, 10 aa, Homo Sapiens
  sequence located in C7 at 503-512 and may interact with Sequence 2332 in this patent.
WSCWSSWSPC

SEQ ID NO: 2332 - protein, 10 aa, Homo Sapiens
  sequence located in RPS29 at 8-17 and may interact with Sequence 2331 in this patent.
AGGPGGPGGP

SEQ ID NO: 2333 - protein, 10 aa, Homo Sapiens
  sequence located in C7 at 77-86 and may interact with Sequence 2334 in this patent.
RGCPTEEGCG

SEQ ID NO: 2334 - protein, 10 aa, Homo Sapiens
  sequence located in Unknown at 252-261 and may interact with Sequence 2333 in this patent.
TSTGCLFAGS

SEQ ID NO: 2335 - protein, 10 aa, Homo Sapiens
  sequence located in C7 at 41-50 and may interact with Sequence 2336 in this patent.
GCTKTQTRRR

SEQ ID NO: 2336 - protein, 10 aa, Homo Sapiens
  sequence located in SKIP OR SNW1 at 128-137 and may interact with Sequence 2335 in this patent.
ATTSLSLRRP

SEQ ID NO: 2337 - protein, 10 aa, Homo Sapiens
  sequence located in C7 at 529-538 and may interact with Sequence 2338 in this patent.
SGGGRSCVGE

SEQ ID NO: 2338 - protein, 10 aa, Homo Sapiens
  sequence located in SMARCA2 OR SNF2L2 OR BRM OR SNF2A at 1271-1280 and may interact with Sequence 2337 in this patent.
FAHTAPPPAG

SEQ ID NO: 2339 - protein, 10 aa, Homo Sapiens
  sequence located in C7 at 530-539 and may interact with Sequence 2340 in this patent.
GGGRSCVGET

SEQ ID NO: 2340 - protein, 10 aa, Homo Sapiens
  sequence located in SMARCA2 OR SNF2L2 OR BRM OR SNF2A at 1270-1279 and may interact with Sequence 2339 in this patent.
SFAHTAPPPA

SEQ ID NO: 2341 - protein, 10 aa, Homo Sapiens
  sequence located in C7 at 791-800 and may interact with Sequence 2342 in this patent.
CREASECEEE

SEQ ID NO: 2342 - protein, 10 aa, Homo Sapiens
  sequence located in SSR4 at 5-14 and may interact with Sequence 2341 in this patent.
ASLGALALLL

SEQ ID NO: 2343 - protein, 10 aa, Homo Sapiens
  sequence located in C7 at 753-762 and may interact with Sequence 2344 in this patent.
RNYTLTGRDS

SEQ ID NO: 2344 - protein, 10 aa, Homo Sapiens
  sequence located in TMPO at 272-281 and may interact with Sequence 2343 in this patent.
PVISESTPIA

SEQ ID NO: 2345 - protein, 10 aa, Homo Sapiens
  sequence located in C7 at 728-737 and may interact with Sequence 2346 in this patent.
CAQDERSKRI

SEQ ID NO: 2346 - protein, 10 aa, Homo Sapiens
  sequence located in TIE2 OR TEK at 2-11 and may interact with Sequence 2345 in this patent.
DSLASLVLCG

SEQ ID NO: 2347 - protein, 10 aa, Homo Sapiens
  sequence located in C7 at 823-832 and may interact with Sequence 2348 in this patent.
LRCRGQSISV

SEQ ID NO: 2348 - protein, 10 aa, Homo Sapiens
  sequence located in TREA at 550-559 and may interact with Sequence 2347 in this patent.
YGDRLTSGAK

SEQ ID NO: 2349 - protein, 10 aa, Homo Sapiens
  sequence located in C7 at 824-833 and may interact with Sequence 2350 in this patent.
RCRGQSISVT

SEQ ID NO: 2350 - protein, 10 aa, Homo Sapiens
  sequence located in TREA at 549-558 and may interact with Sequence 2349 in this patent.
RYGDRLTSGA

SEQ ID NO: 2351 - protein, 10 aa, Homo Sapiens
  sequence located in C7 at 80-89 and may interact with Sequence 2352 in this patent.
PTEEGCGERF

SEQ ID NO: 2352 - protein, 10 aa, Homo Sapiens
  sequence located in ATP6D OR VATC at 159-168 and may interact with Sequence 2351 in this patent.
GSLLTRSLAE

SEQ ID NO: 2353 - protein, 10 aa, Homo Sapiens
  sequence located in C7 at 79-88 and may interact with Sequence 2354 in this patent.
CPTEEGCGER

SEQ ID NO: 2354 - protein, 10 aa, Homo Sapiens
  sequence located in ATP6D OR VATC at 158-167 and may interact with Sequence 2353 in this patent.
AGSLLTRSLA

SEQ ID NO: 2355 - protein, 10 aa, Homo Sapiens
  sequence located in C7 at 531-540 and may interact with Sequence 2356 in this patent.
GGRSCVGETT

SEQ ID NO: 2356 - protein, 10 aa, Homo Sapiens
  sequence located in VIM at 32-41 and may interact with Sequence 2355 in this patent.
TSTRTYSLGS

SEQ ID NO: 2357 - protein, 10 aa, Homo Sapiens
  sequence located in C7 at 530-539 and may interact with Sequence 2358 in this patent.
GGGRSCVGET

SEQ ID NO: 2358 - protein, 10 aa, Homo Sapiens
  sequence located in VIM at 31-40 and may interact with Sequence 2357 in this patent.
TTSTRTYSLG

SEQ ID NO: 2359 - protein, 10 aa, Homo Sapiens
  sequence located in C7 at 757-766 and may interact with Sequence 2360 in this patent.
LTGRDSCTLP

SEQ ID NO: 2360 - protein, 10 aa, Homo Sapiens
  sequence located in WIT1 OR WIT-1 at 17-26 and may interact with Sequence 2359 in this patent.
WQSAGIPASK

SEQ ID NO: 2361 - protein, 10 aa, Homo Sapiens
  sequence located in C7 at 772-781 and may interact with Sequence 2362 in this patent.
ACGACPLWGK

SEQ ID NO: 2362 - protein, 10 aa, Homo Sapiens
  sequence located in KIAA0285 at 101-110 and may interact with Sequence 2361 in this patent.
CTPSRGQPPF

SEQ ID NO: 2363 - protein, 10 aa, Homo Sapiens
  sequence located in C7 at 771-780 and may interact with Sequence 2364 in this patent.
KACGACPLWG

SEQ ID NO: 2364 - protein, 10 aa, Homo Sapiens
  sequence located in KIAA0285 at 100-109 and may interact with Sequence 2363 in this patent.
LCTPSRGQPP

SEQ ID NO: 2365 - protein, 10 aa, Homo Sapiens
  sequence located in C7 at 378-387 and may interact with Sequence 2366 in this patent.
RGGGAGFISG

SEQ ID NO: 2366 - protein, 10 aa, Homo Sapiens
  sequence located in ZIC3 at 423-432 and may interact with Sequence 2365 in this patent.
SGYESSTPPA

SEQ ID NO: 2367 - protein, 10 aa, Homo Sapiens
  sequence located in C7 at 310-319 and may interact with Sequence 2368 in this patent.
GGEYRVLFYV

SEQ ID NO: 2368 - protein, 10 aa, Homo Sapiens
  sequence located in ZNF92 at 184-193 and may interact with Sequence 2367 in this patent.
STLITHKKIH

SEQ ID NO: 2369 - protein, 10 aa, Homo Sapiens
  sequence located in C8A at 514-523 and may interact with Sequence 2370 in this patent.
SCRCQCRLGS

SEQ ID NO: 2370 - protein, 10 aa, Homo Sapiens
  sequence located in MMP11 OR STMY3 at 267-276 and may interact with Sequence 2369 in this patent.
RTPALGPQAG

SEQ ID NO: 2371 - protein, 10 aa, Homo Sapiens
  sequence located in C8A at 513-522 and may interact with Sequence 2372 in this patent.
TSCRCQCRLG

SEQ ID NO: 2372 - protein, 10 aa, Homo Sapiens
  sequence located in MMP11 OR STMY3 at 266-275 and may interact with Sequence 2371 in this patent.
SRTPALGPQA

SEQ ID NO: 2373 - protein, 10 aa, Homo Sapiens
  sequence located in C8A at 512-521 and may interact with Sequence 2374 in this patent.
GTSCRCQCRL

SEQ ID NO: 2374 - protein, 10 aa, Homo Sapiens
  sequence located in MMP11 OR STMY3 at 265-274 and may interact with Sequence 2373 in this patent.
TSRTPALGPQ

SEQ ID NO: 2375 - protein, 10 aa, Homo Sapiens
  sequence located in C8A at 368-377 and may interact with Sequence 2376 in this patent.
TSRDITTCFG

SEQ ID NO: 2376 - protein, 10 aa, Homo Sapiens
  sequence located in CTGF at 106-115 and may interact with Sequence 2375 in this patent.
GGTVYRSGES

SEQ ID NO: 2377 - protein, 10 aa, Homo Sapiens
  sequence located in C8A at 26-35 and may interact with Sequence 2378 in this patent.
QRVRRAATPA

SEQ ID NO: 2378 - protein, 10 aa, Homo Sapiens
  sequence located in DLX3 at 87-96 and may interact with Sequence 2377 in this patent.
LTHPAGRSRR

SEQ ID NO: 2379 - protein, 10 aa, Homo Sapiens
  sequence located in C8A at 422-431 and may interact with Sequence 2380 in this patent.
RVRGGSSGWS

SEQ ID NO: 2380 - protein, 10 aa, Homo Sapiens
  sequence located in DRPLA at 208-217 and may interact with Sequence 2379 in this patent.
APPGAPPPHP

SEQ ID NO: 2381 - protein, 10 aa, Homo Sapiens
  sequence located in C8A at 540-549 and may interact with Sequence 2382 in this patent.
GSWSCWSSWS

SEQ ID NO: 2382 - protein, 10 aa, Homo Sapiens
  sequence located in E2F1 OR RBBP3 at 47-56 and may interact with Sequence 2381 in this patent.
APTGPAAPAA

SEQ ID NO: 2383 - protein, 10 aa, Homo Sapiens
  sequence located in C8A at 540-549 and may interact with Sequence 2384 in this patent.
GSWSCWSSWS

SEQ ID NO: 2384 - protein, 10 aa, Homo Sapiens
  sequence located in E2F1 OR RBBP3 at 46-55 and may interact with Sequence 2383 in this patent.
PAPTGPAAPA

SEQ ID NO: 2385 - protein, 10 aa, Homo Sapiens
  sequence located in C8A at 82-91 and may interact with Sequence 2386 in this patent.
ASCSSSTTCV

SEQ ID NO: 2386 - protein, 10 aa, Homo Sapiens
  sequence located in E2F5 at 42-51 and may interact with Sequence 2385 in this patent.
GGAGGGSSRH

SEQ ID NO: 2387 - protein, 10 aa, Homo Sapiens
  sequence located in C8A at 81-90 and may interact with Sequence 2388 in this patent.
QASCSSSTTC

SEQ ID NO: 2388 - protein, 10 aa, Homo Sapiens
  sequence located in E2F5 at 41-50 and may interact with Sequence 2387 in this patent.
LGGAGGGSSR

SEQ ID NO: 2389 - protein, 10 aa, Homo Sapiens
  sequence located in C8A at 361-370 and may interact with Sequence 2390 in this patent.
KMESLGITSR

SEQ ID NO: 2390 - protein, 10 aa, Homo Sapiens
  sequence located in EEF1D OR EF1D at 38-47 and may interact with Sequence 2389 in this patent.
FHFGQTNRTP

SEQ ID NO: 2391 - protein, 10 aa, Homo Sapiens
  sequence located in C8A at 544-553 and may interact with Sequence 2392 in this patent.
CWSSWSVCRA

SEQ ID NO: 2392 - protein, 10 aa, Homo Sapiens
  sequence located in ELK3 OR NET at 480-489 and may interact with Sequence 2391 in this patent.
TPGAPADTPG

SEQ ID NO: 2393 - protein, 10 aa, Homo Sapiens
  sequence located in C8A at 543-552 and may interact with Sequence 2394 in this patent.
SCWSSWSVCR

SEQ ID NO: 2394 - protein, 10 aa, Homo Sapiens
  sequence located in ELK3 OR NET at 479-488 and may interact with Sequence 2393 in this patent.
ATPGAPADTP

SEQ ID NO: 2395 - protein, 10 aa, Homo Sapiens
  sequence located in C8A at 425-434 and may interact with Sequence 2396 in this patent.
GGSSGWSGGL

SEQ ID NO: 2396 - protein, 10 aa, Homo Sapiens
  sequence located in ERF at 456-465 and may interact with Sequence 2395 in this patent.
TPRAPPAPPK

SEQ ID NO: 2397 - protein, 10 aa, Homo Sapiens
  sequence located in C8A at 424-433 and may interact with Sequence 2398 in this patent.
RGGSSGWSGG

SEQ ID NO: 2398 - protein, 10 aa, Homo Sapiens
  sequence located in FKHL8 OR FREAC4 at 81-90 and may interact with Sequence 2397 in this patent.
PPAGGSPAPP

SEQ ID NO: 2399 - protein, 10 aa, Homo Sapiens
  sequence located in C8A at 81-90 and may interact with Sequence 2400 in this patent.
QASCSSSTTC

SEQ ID NO: 2400 - protein, 10 aa, Homo Sapiens
  sequence located in FKHL8 OR FREAC4 at 239-248 and may interact with Sequence 2399 in this patent.
LRGAGAAGGA

SEQ ID NO: 2401 - protein, 10 aa, Homo Sapiens
  sequence located in C8A at 83-92 and may interact with Sequence 2402 in this patent.
SCSSSTTCVR

SEQ ID NO: 2402 - protein, 10 aa, Homo Sapiens
  sequence located in FXR1 at 428-437 and may interact with Sequence 2401 in this patent.
SYGGRGRGRR

SEQ ID NO: 2403 - protein, 10 aa, Homo Sapiens
  sequence located in C8A at 546-555 and may interact with Sequence 2404 in this patent.
SSWSVCRAGI

SEQ ID NO: 2404 - protein, 10 aa, Homo Sapiens
  sequence located in FXR1 at 439-448 and may interact with Sequence 2403 in this patent.
GGPAYGPSSD

SEQ ID NO: 2405 - protein, 10 aa, Homo Sapiens
  sequence located in C8A at 424-433 and may interact with Sequence 2406 in this patent.
RGGSSGWSGG

SEQ ID NO: 2406 - protein, 10 aa, Homo Sapiens
  sequence located in GATA1 OR GF1 OR ERYF1 at 47-56 and may interact with Sequence 2405 in this patent.
STAPSTATAA

SEQ ID NO: 2407 - protein, 10 aa, Homo Sapiens
  sequence located in C8A at 30-39 and may interact with Sequence 2408 in this patent.
RAATPAAVTC

SEQ ID NO: 2408 - protein, 10 aa, Homo Sapiens
  sequence located in GATA1 OR GF1 OR ERYF1 at 338-347 and may interact with Sequence 2407 in this patent.
AGGSGSGNCG

SEQ ID NO: 2409 - protein, 10 aa, Homo Sapiens
  sequence located in C8A at 519-528 and may interact with Sequence 2410 in this patent.
CRLGSLGAAC

SEQ ID NO: 2410 - protein, 10 aa, Homo Sapiens
  sequence located in GLI1 OR GLI at 296-305 and may interact with Sequence 2409 in this patent.
GPESTEASST

SEQ ID NO: 2411 - protein, 10 aa, Homo Sapiens
  sequence located in C8A at 424-433 and may interact with Sequence 2412 in this patent.
RGGSSGWSGG

SEQ ID NO: 2412 - protein, 10 aa, Homo Sapiens
  sequence located in GRB7 at 19-28 and may interact with Sequence 2411 in this patent.
PAPGTPPGTP

SEQ ID NO: 2413 - protein, 10 aa, Homo Sapiens
  sequence located in C8A at 373-382 and may interact with Sequence 2414 in this patent.
TTCFGGSLGI

SEQ ID NO: 2414 - protein, 10 aa, Homo Sapiens
  sequence located in GRB14 at 379-388 and may interact with Sequence 2413 in this patent.
SSGKATGEAD

SEQ ID NO: 2415 - protein, 10 aa, Homo Sapiens
  sequence located in C8A at 540-549 and may interact with Sequence 2416 in this patent.
GSWSCWSSWS

SEQ ID NO: 2416 - protein, 10 aa, Homo Sapiens
  sequence located in H1F4 at 4-13 and may interact with Sequence 2415 in this patent.
APAAPAAPAP

SEQ ID NO: 2417 - protein, 10 aa, Homo Sapiens
  sequence located in C8A at 540-549 and may interact with Sequence 2418 in this patent.
GSWSCWSSWS

SEQ ID NO: 2418 - protein, 10 aa, Homo Sapiens
  sequence located in H1F4 at 3-12 and may interact with Sequence 2417 in this patent.
TAPAAPAAPA

SEQ ID NO: 2419 - protein, 10 aa, Homo Sapiens
  sequence located in C8A at 29-38 and may interact with Sequence 2420 in this patent.
RRAATPAAVT

SEQ ID NO: 2420 - protein, 10 aa, Homo Sapiens
  sequence located in MLL OR HRX OR ALL1 OR TRX1 OR HTRX at 474-483 and may interact with Sequence 2419 in this patent.
SDSSRSSSPS

SEQ ID NO: 2421 - protein, 10 aa, Homo Sapiens
  sequence located in C8A at 30-39 and may interact with Sequence 2422 in this patent.
RAATPAAVTC

SEQ ID NO: 2422 - protein, 10 aa, Homo Sapiens
  sequence located in IL10RA OR IL10R at 359-368 and may interact with Sequence 2421 in this patent.
SCSSGSSNST

SEQ ID NO: 2423 - protein, 10 aa, Homo Sapiens
  sequence located in C8A at 253-262 and may interact with Sequence 2424 in this patent.
GIGPAGSPLL

SEQ ID NO: 2424 - protein, 10 aa, Homo Sapiens
  sequence located in IL13RA2 OR IL13R at 184-193 and may interact with Sequence 2423 in this patent.
EQWRSRRSYS

SEQ ID NO: 2425 - protein, 10 aa, Homo Sapiens
  sequence located in C8A at 84-93 and may interact with Sequence 2426 in this patent.
CSSSTTCVRQ

SEQ ID NO: 2426 - protein, 10 aa, Homo Sapiens
  sequence located in INSM1 OR IA1 at 151-160 and may interact with Sequence 2425 in this patent.
GGGTCGGDPL

SEQ ID NO: 2427 - protein, 10 aa, Homo Sapiens
  sequence located in C8A at 249-258 and may interact with Sequence 2428 in this patent.
GVTIGIGPAG

SEQ ID NO: 2428 - protein, 10 aa, Homo Sapiens
  sequence located in API2 OR IAP2 OR MIHB at 171-180 and may interact with Sequence 2427 in this patent.
SSRTNPYSYA

SEQ ID NO: 2429 - protein, 10 aa, Homo Sapiens
  sequence located in C8A at 424-433 and may interact with Sequence 2430 in this patent.
RGGSSGWSGG

SEQ ID NO: 2430 - protein, 10 aa, Homo Sapiens
  sequence located in Unknown at 45-54 and may interact with Sequence 2429 in this patent.
AAAPAGRPSA

SEQ ID NO: 2431 - protein, 10 aa, Homo Sapiens
  sequence located in C8A at 30-39 and may interact with Sequence 2432 in this patent.
RAATPAAVTC

SEQ ID NO: 2432 - protein, 10 aa, Homo Sapiens
  sequence located in KRT9 at 605-614 and may interact with Sequence 2431 in this patent.
ASGSGGGYGG

SEQ ID NO: 2433 - protein, 10 aa, Homo Sapiens
  sequence located in C8A at 30-39 and may interact with Sequence 2434 in this patent.
RAATPAAVTC

SEQ ID NO: 2434 - protein, 10 aa, Homo Sapiens
  sequence located in KRT9 at 542-551 and may interact with Sequence 2433 in this patent.
SGGSGGGHSG

SEQ ID NO: 2435 - protein, 10 aa, Homo Sapiens
  sequence located in C8A at 30-39 and may interact with Sequence 2436 in this patent.
RAATPAAVTC

SEQ ID NO: 2436 - protein, 10 aa, Homo Sapiens
  sequence located in KRT15 OR KRTB at 53-62 and may interact with Sequence 2435 in this patent.
SSGSGGGYGG

SEQ ID NO: 2437 - protein, 10 aa, Homo Sapiens
  sequence located in C8A at 30-39 and may interact with Sequence 2438 in this patent.
RAATPAAVTC

SEQ ID NO: 2438 - protein, 10 aa, Homo Sapiens
  sequence located in KRT2E at 552-561 and may interact with Sequence 2437 in this patent.
SGGSGSGYGG

SEQ ID NO: 2439 - protein, 10 aa, Homo Sapiens
  sequence located in C8A at 396-405 and may interact with Sequence 2440 in this patent.
GDHCKKFGGG

SEQ ID NO: 2440 - protein, 10 aa, Homo Sapiens
  sequence located in PFKM at 320-329 and may interact with Sequence 2439 in this patent.
AVMALLEATP

SEQ ID NO: 2441 - protein, 10 aa, Homo Sapiens
  sequence located in C8A at 423-432 and may interact with Sequence 2442 in this patent.
VRGGSSGWSG

SEQ ID NO: 2442 - protein, 10 aa, Homo Sapiens
  sequence located in CSNK1D at 330-339 and may interact with Sequence 2441 in this patent.
PGPPTGATAN

SEQ ID NO: 2443 - protein, 10 aa, Homo Sapiens
  sequence located in C8A at 424-433 and may interact with Sequence 2444 in this patent.
RGGSSGWSGG

SEQ ID NO: 2444 - protein, 10 aa, Homo Sapiens
  sequence located in CSNK1D at 329-338 and may interact with Sequence 2443 in this patent.
PPGPPTGATA

SEQ ID NO: 2445 - protein, 10 aa, Homo Sapiens
  sequence located in C8A at 424-433 and may interact with Sequence 2446 in this patent.
RGGSSGWSGG

SEQ ID NO: 2446 - protein, 10 aa, Homo Sapiens
  sequence located in KIF1C at 1013-1022 and may interact with Sequence 2445 in this patent.
PATPARRPPS

SEQ ID NO: 2447 - protein, 10 aa, Homo Sapiens
  sequence located in C8A at 420-429 and may interact with Sequence 2448 in this patent.
ISRVRGGSSG

SEQ ID NO: 2448 - protein, 10 aa, Homo Sapiens
  sequence located in LIPA at 280-289 and may interact with Sequence 2447 in this patent.
YTTHSPAGTS

SEQ ID NO: 2449 - protein, 10 aa, Homo Sapiens
  sequence located in C8A at 424-433 and may interact with Sequence 2450 in this patent.
RGGSSGWSGG

SEQ ID NO: 2450 - protein, 10 aa, Homo Sapiens
  sequence located in LIM2 at 196-205 and may interact with Sequence 2449 in this patent.
SPTTAPPAPP

SEQ ID NO: 2451 - protein, 10 aa, Homo Sapiens
  sequence located in C8A at 30-39 and may interact with Sequence 2452 in this patent.
RAATPAAVTC

SEQ ID NO: 2452 - protein, 10 aa, Homo Sapiens
  sequence located in Unknown at 46-55 and may interact with Sequence 2451 in this patent.
SSGSGCGYSG

SEQ ID NO: 2453 - protein, 10 aa, Homo Sapiens
  sequence located in C8A at 30-39 and may interact with Sequence 2454 in this patent.
RAATPAAVTC

SEQ ID NO: 2454 - protein, 10 aa, Homo Sapiens
  sequence located in Unknown at 21-30 and may interact with Sequence 2453 in this patent.
SCSGGSSNGT

SEQ ID NO: 2455 - protein, 10 aa, Homo Sapiens
  sequence located in C8A at 467-476 and may interact with Sequence 2456 in this patent.
VLRHTSLGPL

SEQ ID NO: 2456 - protein, 10 aa, Homo Sapiens
  sequence located in MTR at 999-1008 and may interact with Sequence 2455 in this patent.
DKTVGGEARK

SEQ ID NO: 2457 - protein, 10 aa, Homo Sapiens
  sequence located in C8A at 424-433 and may interact with Sequence 2458 in this patent.
RGGSSGWSGG

SEQ ID NO: 2458 - protein, 10 aa, Homo Sapiens
  sequence located in MNDA at 158-167 and may interact with Sequence 2457 in this patent.
PPGPSGASTS

SEQ ID NO: 2459 - protein, 10 aa, Homo Sapiens
  sequence located in C8A at 425-434 and may interact with Sequence 2460 in this patent.
GGSSGWSGGL

SEQ ID NO: 2460 - protein, 10 aa, Homo Sapiens
  sequence located in MNDA at 157-166 and may interact with Sequence 2459 in this patent.
KPPGPSGAST

SEQ ID NO: 2461 - protein, 10 aa, Homo Sapiens
  sequence located in C8A at 426-435 and may interact with Sequence 2462 in this patent.
GSSGWSGGLA

SEQ ID NO: 2462 - protein, 10 aa, Homo Sapiens
  sequence located in MNDA at 156-165 and may interact with Sequence 2461 in this patent.
SKPPGPSGAS

SEQ ID NO: 2463 - protein, 10 aa, Homo Sapiens
  sequence located in C8A at 267-276 and may interact with Sequence 2464 in this patent.
VSHSQDTSFL

SEQ ID NO: 2464 - protein, 10 aa, Homo Sapiens
  sequence located in M6PR OR MPRD OR MPR46 at 2449-2458 and may interact with Sequence 2463 in this patent.
DRVGLVRGEK

SEQ ID NO: 2465 - protein, 10 aa, Homo Sapiens
  sequence located in C8A at 424-433 and may interact with Sequence 2466 in this patent.
RGGSSGWSGG

SEQ ID NO: 2466 - protein, 10 aa, Homo Sapiens
  sequence located in DNMT at 582-591 and may interact with Sequence 2465 in this patent.
TPPAATPRST

SEQ ID NO: 2467 - protein, 10 aa, Homo Sapiens
  sequence located in C8A at 423-432 and may interact with Sequence 2468 in this patent.
VRGGSSGWSG

SEQ ID NO: 2468 - protein, 10 aa, Homo Sapiens
  sequence located in DNMT at 581-590 and may interact with Sequence 2467 in this patent.
DTPPAATPRS

SEQ ID NO: 2469 - protein, 10 aa, Homo Sapiens
  sequence located in C8A at 85-94 and may interact with Sequence 2470 in this patent.
SSSTTCVRQA

SEQ ID NO: 2470 - protein, 10 aa, Homo Sapiens
  sequence located in MUC2 OR SMUC at 4260-4269 and may interact with Sequence 2469 in this patent.
TTTSGGHTLS

SEQ ID NO: 2471 - protein, 10 aa, Homo Sapiens
  sequence located in C8A at 424-433 and may interact with Sequence 2472 in this patent.
RGGSSGWSGG

SEQ ID NO: 2472 - protein, 10 aa, Homo Sapiens
  sequence located in MUC5AC OR MUC5 at 838-847 and may interact with Sequence 2471 in this patent.
SPTPARAPPT

SEQ ID NO: 2473 - protein, 10 aa, Homo Sapiens
  sequence located in C8A at 424-433 and may interact with Sequence 2474 in this patent.
RGGSSGWSGG

SEQ ID NO: 2474 - protein, 10 aa, Homo Sapiens
  sequence located in MUC5AC OR MUC5 at 840-849 and may interact with Sequence 2473 in this patent.
TPARAPPTSS

SEQ ID NO: 2475 - protein, 10 aa, Homo Sapiens
  sequence located in C8A at 423-432 and may interact with Sequence 2476 in this patent.
VRGGSSGWSG

SEQ ID NO: 2476 - protein, 10 aa, Homo Sapiens
  sequence located in NEUROD3 at 45-54 and may interact with Sequence 2475 in this patent.
PAPARRSAPN

SEQ ID NO: 2477 - protein, 10 aa, Homo Sapiens
  sequence located in C8A at 424-433 and may interact with Sequence 2478 in this patent.
RGGSSGWSGG

SEQ ID NO: 2478 - protein, 10 aa, Homo Sapiens
  sequence located in NEUROD3 at 44-53 and may interact with Sequence 2477 in this patent.
PPAPARRSAP

SEQ ID NO: 2479 - protein, 10 aa, Homo Sapiens
  sequence located in C8A at 421-430 and may interact with Sequence 2480 in this patent.
SRVRGGSSGW

SEQ ID NO: 2480 - protein, 10 aa, Homo Sapiens
  sequence located in NTAK at 140-149 and may interact with Sequence 2479 in this patent.
PAGGSSSNST

SEQ ID NO: 2481 - protein, 10 aa, Homo Sapiens
  sequence located in C8A at 404-413 and may interact with Sequence 2482 in this patent.
GGKTERARKA

SEQ ID NO: 2482 - protein, 10 aa, Homo Sapiens
  sequence located in NOTCH1 OR TAN1 at 92-101 and may interact with Sequence 2481 in this patent.
GFSGPLCLTP

SEQ ID NO: 2483 - protein, 10 aa, Homo Sapiens
  sequence located in C8A at 424-433 and may interact with Sequence 2484 in this patent.
RGGSSGWSGG

SEQ ID NO: 2484 - protein, 10 aa, Homo Sapiens
  sequence located in DLAT OR DLTA at 161-170 and may interact with Sequence 2483 in this patent.
APTPAATASP

SEQ ID NO: 2485 - protein, 10 aa, Homo Sapiens
  sequence located in C8A at 81-90 and may interact with Sequence 2486 in this patent.
QASCSSSTTC

SEQ ID NO: 2486 - protein, 10 aa, Homo Sapiens
  sequence located in P2RY7 OR GPR16 OR CMKRL1 at 312-321 and may interact with Sequence 2485 in this patent.
ASSTRRGGSL

SEQ ID NO: 2487 - protein, 10 aa, Homo Sapiens
  sequence located in C8A at 372-381 and may interact with Sequence 2488 in this patent.
ITTCFGGSLG

SEQ ID NO: 2488 - protein, 10 aa, Homo Sapiens
  sequence located in PTGER3 at 27-36 and may interact with Sequence 2487 in this patent.
PERSAEARGN

SEQ ID NO: 2489 - protein, 10 aa, Homo Sapiens
  sequence located in C8A at 30-39 and may interact with Sequence 2490 in this patent.
RAATPAAVTC

SEQ ID NO: 2490 - protein, 10 aa, Homo Sapiens
  sequence located in PXR1 OR PEX5 at 810-819 and may interact with Sequence 2489 in this patent.
PSRGRSGDSG

SEQ ID NO: 2491 - protein, 10 aa, Homo Sapiens
  sequence located in C8A at 29-38 and may interact with Sequence 2492 in this patent.
RRAATPAAVT

SEQ ID NO: 2492 - protein, 10 aa, Homo Sapiens
  sequence located in PXR1 OR PEX5 at 809-818 and may interact with Sequence 2491 in this patent.
APSRGRSGDS

SEQ ID NO: 2493 - protein, 10 aa, Homo Sapiens
  sequence located in C8A at 138-147 and may interact with Sequence 2494 in this patent.
EDCSQYEPIP

SEQ ID NO: 2494 - protein, 10 aa, Homo Sapiens
  sequence located in PDGFRA at 590-599 and may interact with Sequence 2493 in this patent.
RDGLVLGRVL

SEQ ID NO: 2495 - protein, 10 aa, Homo Sapiens
  sequence located in C8A at 139-148 and may interact with Sequence 2496 in this patent.
DCSQYEPIPG

SEQ ID NO: 2496 - protein, 10 aa, Homo Sapiens
  sequence located in PDGFRA at 589-598 and may interact with Sequence 2495 in this patent.
PRDGLVLGRV

SEQ ID NO: 2497 - protein, 10 aa, Homo Sapiens
  sequence located in C8A at 424-433 and may interact with Sequence 2498 in this patent.
RGGSSGWSGG

SEQ ID NO: 2498 - protein, 10 aa, Homo Sapiens
  sequence located in PLCB3 at 915-924 and may interact with Sequence 2497 in this patent.
ASPRRPPGPT

SEQ ID NO: 2499 - protein, 10 aa, Homo Sapiens
  sequence located in C8A at 423-432 and may interact with Sequence 2500 in this patent.
VRGGSSGWSG

SEQ ID NO: 2500 - protein, 10 aa, Homo Sapiens
  sequence located in PLCB3 at 914-923 and may interact with Sequence 2499 in this patent.
DASPRRPPGP

SEQ ID NO: 2501 - protein, 10 aa, Homo Sapiens
  sequence located in C8A at 27-36 and may interact with Sequence 2502 in this patent.
RVRRAATPAA

SEQ ID NO: 2502 - protein, 10 aa, Homo Sapiens
  sequence located in PRCC OR TPRC at 77-86 and may interact with Sequence 2501 in this patent.
CCRSGSAADT

SEQ ID NO: 2503 - protein, 10 aa, Homo Sapiens
  sequence located in C8A at 249-258 and may interact with Sequence 2504 in this patent.
GVTIGIGPAG

SEQ ID NO: 2504 - protein, 10 aa, Homo Sapiens
  sequence located in PSMB5 OR LMPX at 168-177 and may interact with Sequence 2503 in this patent.
TYRDAYSGGA

SEQ ID NO: 2505 - protein, 10 aa, Homo Sapiens
  sequence located in C8A at 424-433 and may interact with Sequence 2506 in this patent.
RGGSSGWSGG

SEQ ID NO: 2506 - protein, 10 aa, Homo Sapiens
  sequence located in PSF at 158-167 and may interact with Sequence 2505 in this patent.
TSAPPGAPPP

SEQ ID NO: 2507 - protein, 10 aa, Homo Sapiens
  sequence located in C8A at 424-433 and may interact with Sequence 2508 in this patent.
RGGSSGWSGG

SEQ ID NO: 2508 - protein, 10 aa, Homo Sapiens
  sequence located in PSF at 129-138 and may interact with Sequence 2507 in this patent.
SSAPPATPPT

SEQ ID NO: 2509 - protein, 10 aa, Homo Sapiens
  sequence located in C8A at 570-579 and may interact with Sequence 2510 in this patent.
GGASCPGRKV

SEQ ID NO: 2510 - protein, 10 aa, Homo Sapiens
  sequence located in RET at 689-698 and may interact with Sequence 2509 in this patent.
SSGARRPSLD

SEQ ID NO: 2511 - protein, 10 aa, Homo Sapiens
  sequence located in C8A at 424-433 and may interact with Sequence 2512 in this patent.
RGGSSGWSGG

SEQ ID NO: 2512 - protein, 10 aa, Homo Sapiens
  sequence located in Unknown at 130-139 and may interact with Sequence 2511 in this patent.
PAPAASPAAS

SEQ ID NO: 2513 - protein, 10 aa, Homo Sapiens
  sequence located in C8A at 424-433 and may interact with Sequence 2514 in this patent.
RGGSSGWSGG

SEQ ID NO: 2514 - protein, 10 aa, Homo Sapiens
  sequence located in RGS12 at 1281-1290 and may interact with Sequence 2513 in this patent.
PPGPPGTTPP

SEQ ID NO: 2515 - protein, 10 aa, Homo Sapiens
  sequence located in C8A at 424-433 and may interact with Sequence 2516 in this patent.
RGGSSGWSGG

SEQ ID NO: 2516 - protein, 10 aa, Homo Sapiens
  sequence located in RPLP2 at 79-88 and may interact with Sequence 2515 in this patent.
SAAPAAGSAP

SEQ ID NO: 2517 - protein, 10 aa, Homo Sapiens
  sequence located in C8A at 27-36 and may interact with Sequence 2518 in this patent.
RVRRAATPAA

SEQ ID NO: 2518 - protein, 10 aa, Homo Sapiens
  sequence located in SET at 224-233 and may interact with Sequence 2517 in this patent.
SYSPRRSRGS

SEQ ID NO: 2519 - protein, 10 aa, Homo Sapiens
  sequence located in C8A at 259-268 and may interact with Sequence 2520 in this patent.
SPLLVGVGVS

SEQ ID NO: 2520 - protein, 10 aa, Homo Sapiens
  sequence located in SFRS5 OR SRP40 OR HRS at 137-146 and may interact with Sequence 2519 in this patent.
TYADAHKERT

SEQ ID NO: 2521 - protein, 10 aa, Homo Sapiens
  sequence located in C8A at 260-269 and may interact with Sequence 2522 in this patent.
PLLVGVGVSH

SEQ ID NO: 2522 - protein, 10 aa, Homo Sapiens
  sequence located in SFRS5 OR SRP40 OR HRS at 136-145 and may interact with Sequence 2521 in this patent.
VTYADAHKER

SEQ ID NO: 2523 - protein, 10 aa, Homo Sapiens
  sequence located in C8A at 373-382 and may interact with Sequence 2524 in this patent.
TTCFGGSLGI

SEQ ID NO: 2524 - protein, 10 aa, Homo Sapiens
  sequence located in IBSP OR BNSP at 210-219 and may interact with Sequence 2523 in this patent.
NAEGTTETGG

SEQ ID NO: 2525 - protein, 10 aa, Homo Sapiens
  sequence located in C8A at 424-433 and may interact with Sequence 2526 in this patent.
RGGSSGWSGG

SEQ ID NO: 2526 - protein, 10 aa, Homo Sapiens
  sequence located in SIX3 at 297-306 and may interact with Sequence 2525 in this patent.
PSTAASPTTS

SEQ ID NO: 2527 - protein, 10 aa, Homo Sapiens
  sequence located in C8A at 83-92 and may interact with Sequence 2528 in this patent.
SCSSSTTCVR

SEQ ID NO: 2528 - protein, 10 aa, Homo Sapiens
  sequence located in SMOH at 27-36 and may interact with Sequence 2527 in this patent.
GRGAASSGNA

SEQ ID NO: 2529 - protein, 10 aa, Homo Sapiens
  sequence located in C8A at 520-529 and may interact with Sequence 2530 in this patent.
RLGSLGAACE

SEQ ID NO: 2530 - protein, 10 aa, Homo Sapiens
  sequence located in GH2 at 815-824 and may interact with Sequence 2529 in this patent.
LRSRSKRSKS

SEQ ID NO: 2531 - protein, 10 aa, Homo Sapiens
  sequence located in C8A at 424-433 and may interact with Sequence 2532 in this patent.
RGGSSGWSGG

SEQ ID NO: 2532 - protein, 10 aa, Homo Sapiens
  sequence located in SOX6 at 322-331 and may interact with Sequence 2531 in this patent.
SSTAATPASA

SEQ ID NO: 2533 - protein, 10 aa, Homo Sapiens
  sequence located in C8A at 83-92 and may interact with Sequence 2534 in this patent.
SCSSSTTCVR

SEQ ID NO: 2534 - protein, 10 aa, Homo Sapiens
  sequence located in SRC OR SRC1 at 50-59 and may interact with Sequence 2533 in this patent.
PYAGSGAGGT

SEQ ID NO: 2535 - protein, 10 aa, Homo Sapiens
  sequence located in C8A at 398-407 and may interact with Sequence 2536 in this patent.
HCKKFGGGKT

SEQ ID NO: 2536 - protein, 10 aa, Homo Sapiens
  sequence located in SUR at 1108-1117 and may interact with Sequence 2535 in this patent.
MRFFETTPLG

SEQ ID NO: 2537 - protein, 10 aa, Homo Sapiens
  sequence located in C8A at 29-38 and may interact with Sequence 2538 in this patent.
RRAATPAAVT

SEQ ID NO: 2538 - protein, 10 aa, Homo Sapiens
  sequence located in SYP at 281-290 and may interact with Sequence 2537 in this patent.
PAGSGGSGYG

SEQ ID NO: 2539 - protein, 10 aa, Homo Sapiens
  sequence located in C8A at 424-433 and may interact with Sequence 2540 in this patent.
RGGSSGWSGG

SEQ ID NO: 2540 - protein, 10 aa, Homo Sapiens
  sequence located in TAF2C1 OR TAF2C OR TAFII135 OR TAFII130 at 285-294 and may interact with Sequence 2539 in this patent.
PAGPPTAAPA

SEQ ID NO: 2541 - protein, 10 aa, Homo Sapiens
  sequence located in C8A at 424-433 and may interact with Sequence 2542 in this patent.
RGGSSGWSGG

SEQ ID NO: 2542 - protein, 10 aa, Homo Sapiens
  sequence located in TAF2C1 OR TAF2C OR TAFII135 OR TAFII130 at 261-270 and may interact with Sequence 2541 in this patent.
PAAPAAAPPP

SEQ ID NO: 2543 - protein, 10 aa, Homo Sapiens
  sequence located in C8A at 81-90 and may interact with Sequence 2544 in this patent.
QASCSSSTTC

SEQ ID NO: 2544 - protein, 10 aa, Homo Sapiens
  sequence located in TAF2J OR TAFII20 OR TAF15 at 355-364 and may interact with Sequence 2543 in this patent.
TGGTTAGTGL

SEQ ID NO: 2545 - protein, 10 aa, Homo Sapiens
  sequence located in C8A at 570-579 and may interact with Sequence 2546 in this patent.
GGASCPGRKV

SEQ ID NO: 2546 - protein, 10 aa, Homo Sapiens
  sequence located in TBXA2R at 453-462 and may interact with Sequence 2545 in this patent.
SPSGAGSTLH

SEQ ID NO: 2547 - protein, 10 aa, Homo Sapiens
  sequence located in C8A at 403-412 and may interact with Sequence 2548 in this patent.
GGGKTERARK

SEQ ID NO: 2548 - protein, 10 aa, Homo Sapiens
  sequence located in TBX3 at 51-60 and may interact with Sequence 2547 in this patent.
AAALSLPGAL

SEQ ID NO: 2549 - protein, 10 aa, Homo Sapiens
  sequence located in C8A at 30-39 and may interact with Sequence 2550 in this patent.
RAATPAAVTC

SEQ ID NO: 2550 - protein, 10 aa, Homo Sapiens
  sequence located in TGM2 at 208-217 and may interact with Sequence 2549 in this patent.
GRDCSRRSSP

SEQ ID NO: 2551 - protein, 10 aa, Homo Sapiens
  sequence located in C8A at 27-36 and may interact with Sequence 2552 in this patent.
RVRRAATPAA

SEQ ID NO: 2552 - protein, 10 aa, Homo Sapiens
  sequence located in Unknown at 294-303 and may interact with Sequence 2551 in this patent.
SYPSSGSGSS

SEQ ID NO: 2553 - protein, 10 aa, Homo Sapiens
  sequence located in C8A at 424-433 and may interact with Sequence 2554 in this patent.
RGGSSGWSGG

SEQ ID NO: 2554 - protein, 10 aa, Homo Sapiens
  sequence located in KIAA0079 at 64-73 and may interact with Sequence 2553 in this patent.
PSSGAPPAST

SEQ ID NO: 2555 - protein, 10 aa, Homo Sapiens
  sequence located in C8A at 424-433 and may interact with Sequence 2556 in this patent.
RGGSSGWSGG

SEQ ID NO: 2556 - protein, 10 aa, Homo Sapiens
  sequence located in KIAA0166 at 800-809 and may interact with Sequence 2555 in this patent.
ATTPSAATTP

SEQ ID NO: 2557 - protein, 10 aa, Homo Sapiens
  sequence located in C8A at 83-92 and may interact with Sequence 2558 in this patent.
SCSSSTTCVR

SEQ ID NO: 2558 - protein, 10 aa, Homo Sapiens
  sequence located in KIAA0253 at 2-11 and may interact with Sequence 2557 in this patent.
TAGGGSGADP

SEQ ID NO: 2559 - protein, 10 aa, Homo Sapiens
  sequence located in C8A at 429-438 and may interact with Sequence 2560 in this patent.
GWSGGLAQNR

SEQ ID NO: 2560 - protein, 10 aa, Homo Sapiens
  sequence located in KIAA0285 at 41-50 and may interact with Sequence 2559 in this patent.
TVLSESSGPS

SEQ ID NO: 2561 - protein, 10 aa, Homo Sapiens
  sequence located in C8A at 430-439 and may interact with Sequence 2562 in this patent.
WSGGLAQNRS

SEQ ID NO: 2562 - protein, 10 aa, Homo Sapiens
  sequence located in KIAA0285 at 40-49 and may interact with Sequence 2561 in this patent.
TTVLSESSGP

SEQ ID NO: 2563 - protein, 10 aa, Homo Sapiens
  sequence located in C9 at 266-275 and may interact with Sequence 2564 in this patent.
GKGSFRFSYS

SEQ ID NO: 2564 - protein, 10 aa, Homo Sapiens
  sequence located in EMX1 at 55-64 and may interact with Sequence 2563 in this patent.
ALARKPKRIR

SEQ ID NO: 2565 - protein, 10 aa, Homo Sapiens
  sequence located in C9 at 62-71 and may interact with Sequence 2566 in this patent.
FRSRSIEVFG

SEQ ID NO: 2566 - protein, 10 aa, Homo Sapiens
  sequence located in FBP2 at 217-226 and may interact with Sequence 2565 in this patent.
AKYFDAATTE

SEQ ID NO: 2567 - protein, 10 aa, Homo Sapiens
  sequence located in C9 at 242-251 and may interact with Sequence 2568 in this patent.
KFTPTETNKA

SEQ ID NO: 2568 - protein, 10 aa, Homo Sapiens
  sequence located in GFRP at 59-68 and may interact with Sequence 2567 in this patent.
LERRGFRVLS

SEQ ID NO: 2569 - protein, 10 aa, Homo Sapiens
  sequence located in C9 at 241-250 and may interact with Sequence 2570 in this patent.
LKFTPTETNK

SEQ ID NO: 2570 - protein, 10 aa, Homo Sapiens
  sequence located in GFRP at 58-67 and may interact with Sequence 2569 in this patent.
KLERRGFRVL

SEQ ID NO: 2571 - protein, 10 aa, Homo Sapiens
  sequence located in C9 at 425-434 and may interact with Sequence 2572 in this patent.
VVSLIRGGTR

SEQ ID NO: 2572 - protein, 10 aa, Homo Sapiens
  sequence located in HTN3 OR HIS2 at 247-256 and may interact with Sequence 2571 in this patent.
YNAQYSSAST

SEQ ID NO: 2573 - protein, 10 aa, Homo Sapiens
  sequence located in C9 at 347-356 and may interact with Sequence 2574 in this patent.
SSSGSLGGLY

SEQ ID NO: 2574 - protein, 10 aa, Homo Sapiens
  sequence located in MLL OR HRX OR ALL1 OR TRX1 OR HTRX at 2731-2740 and may interact with Sequence 2573 in this patent.
TATTRKSSQI

SEQ ID NO: 2575 - protein, 10 aa, Homo Sapiens
  sequence located in C9 at 346-355 and may interact with Sequence 2576 in this patent.
YSSSGSLGGL

SEQ ID NO: 2576 - protein, 10 aa, Homo Sapiens
  sequence located in MLL OR HRX OR ALL1 OR TRX1 OR HTRX at 2730-2739 and may interact with Sequence 2575 in this patent.
VTATTRKSSQ

SEQ ID NO: 2577 - protein, 10 aa, Homo Sapiens
  sequence located in C9 at 141-150 and may interact with Sequence 2578 in this patent.
PCRDRVVEES

SEQ ID NO: 2578 - protein, 10 aa, Homo Sapiens
  sequence located in Unknown at 825-834 and may interact with Sequence 2577 in this patent.
TLLHHAVSTG

SEQ ID NO: 2579 - protein, 10 aa, Homo Sapiens
  sequence located in C9 at 345-354 and may interact with Sequence 2580 in this patent.
HYSSSGSLGG

SEQ ID NO: 2580 - protein, 10 aa, Homo Sapiens
  sequence located in PMEL17 OR D12S53E at 332-341 and may interact with Sequence 2579 in this patent.
VVGTTPGQAP

SEQ ID NO: 2581 - protein, 10 aa, Homo Sapiens
  sequence located in C9 at 433-442 and may interact with Sequence 2582 in this patent.
TRKYAFELKE

SEQ ID NO: 2582 - protein, 10 aa, Homo Sapiens
  sequence located in TBXA2R at 314-323 and may interact with Sequence 2581 in this patent.
FLELKSVLTR

SEQ ID NO: 2583 - protein, 10 aa, Homo Sapiens
  sequence located in C9 at 490-499 and may interact with Sequence 2584 in this patent.
KKQNLERAIE

SEQ ID NO: 2584 - protein, 10 aa, Homo Sapiens
  sequence located in UGT1 OR GNT1 at 9-18 and may interact with Sequence 2583 in this patent.
LLLIQLSCYF

SEQ ID NO: 2585 - protein, 10 aa, Homo Sapiens
  sequence located in C9 at 328-337 and may interact with Sequence 2586 in this patent.
TTYEKGEYFA

SEQ ID NO: 2586 - protein, 10 aa, Homo Sapiens
  sequence located in KIAA0076 at 247-256 and may interact with Sequence 2585 in this patent.
GRVLFSLVKR

SEQ ID NO: 2587 - protein, 10 aa, Homo Sapiens
  sequence located in COPD OR ARCN1 at 499-508 and may interact with Sequence 2588 in this patent.
ETHEGVTEDG

SEQ ID NO: 2588 - protein, 10 aa, Homo Sapiens
  sequence located in GPR19 at 79-88 and may interact with Sequence 2587 in this patent.
SIFGNSLVCL

SEQ ID NO: 2589 - protein, 10 aa, Homo Sapiens
  sequence located in COPD OR ARCN1 at 645-654 and may interact with Sequence 2590 in this patent.
ELALQLGELK

SEQ ID NO: 2590 - protein, 10 aa, Homo Sapiens
  sequence located in HOXC12 OR HOX3F at 11-20 and may interact with Sequence 2589 in this patent.
LQLAELEGEF

SEQ ID NO: 2591 - protein, 10 aa, Homo Sapiens
  sequence located in COPD OR ARCN1 at 277-286 and may interact with Sequence 2592 in this patent.
ASLRGSNNVA

SEQ ID NO: 2592 - protein, 10 aa, Homo Sapiens
  sequence located in CITED1 OR MSG1 at 141-150 and may interact with Sequence 2591 in this patent.
GAQSPAIIDS

SEQ ID NO: 2593 - protein, 10 aa, Homo Sapiens
  sequence located in COPD OR ARCN1 at 217-226 and may interact with Sequence 2594 in this patent.
NKTCVQTLEG

SEQ ID NO: 2594 - protein, 10 aa, Homo Sapiens
  sequence located in PCK2 OR PEPCK2 at 32-41 and may interact with Sequence 2593 in this patent.
VLSGDLGQLP

SEQ ID NO: 2595 - protein, 10 aa, Homo Sapiens
  sequence located in COPD OR ARCN1 at 100-109 and may interact with Sequence 2596 in this patent.
YIRCIAVHPT

SEQ ID NO: 2596 - protein, 10 aa, Homo Sapiens
  sequence located in TIE2 OR TEK at 1014-1023 and may interact with Sequence 2595 in this patent.
VYTTNSDVWS

SEQ ID NO: 2597 - protein, 10 aa, Homo Sapiens
  sequence located in COPD OR ARCN1 at 246-255 and may interact with Sequence 2598 in this patent.
GSEDGTVRIW

SEQ ID NO: 2598 - protein, 10 aa, Homo Sapiens
  sequence located in KIAA0274 at 451-460 and may interact with Sequence 2597 in this patent.
PDSYCSILRP

SEQ ID NO: 2599 - protein, 10 aa, Homo Sapiens
  sequence located in COPD OR ARCN1 at 336-345 and may interact with Sequence 2600 in this patent.
DGERLPLAVK

SEQ ID NO: 2600 - protein, 10 aa, Homo Sapiens
  sequence located in ZNF74 at 505-514 and may interact with Sequence 2599 in this patent.
LHSEGKPLAI

SEQ ID NO: 2601 - protein, 10 aa, Homo Sapiens
  sequence located in TFCOUP1 OR NR2F1 OR ERBAL3 OR EAR3 at 327-336 and may interact with Sequence 2602 in this patent.
LFTSDACGLS

SEQ ID NO: 2602 - protein, 10 aa, Homo Sapiens
  sequence located in POLA2 at 121-130 and may interact with Sequence 2601 in this patent.
QKRAISTPET

SEQ ID NO: 2603 - protein, 10 aa, Homo Sapiens
  sequence located in TFCOUP1 OR NR2F1 OR ERBAL3 OR EAR3 at 56-65 and may interact with Sequence 2604 in this patent.
GQPGAPATPG

SEQ ID NO: 2604 - protein, 10 aa, Homo Sapiens
  sequence located in POLE1 OR POLE at 2-11 and may interact with Sequence 2603 in this patent.
SLRSGGRRRA

SEQ ID NO: 2605 - protein, 10 aa, Homo Sapiens
  sequence located in TFCOUP1 OR NR2F1 OR ERBAL3 OR EAR3 at 194-203 and may interact with Sequence 2606 in this patent.
RAEPYPTSRY

SEQ ID NO: 2606 - protein, 10 aa, Homo Sapiens
  sequence located in DSG1 at 996-1005 and may interact with Sequence 2605 in this patent.
ISGGGIGLSS

SEQ ID NO: 2607 - protein, 10 aa, Homo Sapiens
  sequence located in TFCOUP1 OR NR2F1 OR ERBAL3 OR EAR3 at 356-365 and may interact with Sequence 2608 in this patent.
VRSQYPNQPS

SEQ ID NO: 2608 - protein, 10 aa, Homo Sapiens
  sequence located in GPR40 at 204-213 and may interact with Sequence 2607 in this patent.
YSRLVWILGR

SEQ ID NO: 2609 - protein, 10 aa, Homo Sapiens
  sequence located in TFCOUP1 OR NR2F1 OR ERBAL3 OR EAR3 at 356-365 and may interact with Sequence 2610 in this patent.
VRSQYPNQPS

SEQ ID NO: 2610 - protein, 10 aa, Homo Sapiens
  sequence located in GPR42 at 204-213 and may interact with Sequence 2609 in this patent.
YSRLVWILGR

SEQ ID NO: 2611 - protein, 10 aa, Homo Sapiens
  sequence located in TFCOUP1 OR NR2F1 OR ERBAL3 OR EAR3 at 58-67 and may interact with Sequence 2612 in this patent.
PGAPATPGTA

SEQ ID NO: 2612 - protein, 10 aa, Homo Sapiens
  sequence located in HLX1 at 419-428 and may interact with Sequence 2611 in this patent.
SSAGSGGSSG

SEQ ID NO: 2613 - protein, 10 aa, Homo Sapiens
  sequence located in TFCOUP1 OR NR2F1 OR ERBAL3 OR EAR3 at 59-68 and may interact with Sequence 2614 in this patent.
GAPATPGTAG

SEQ ID NO: 2614 - protein, 10 aa, Homo Sapiens
  sequence located in HLX1 at 418-427 and may interact with Sequence 2613 in this patent.
ASSAGSGGSS

SEQ ID NO: 2615 - protein, 10 aa, Homo Sapiens
  sequence located in TFCOUP1 OR NR2F1 OR ERBAL3 OR EAR3 at 390-399 and may interact with Sequence 2616 in this patent.
FVRLVGKTPI

SEQ ID NO: 2616 - protein, 10 aa, Homo Sapiens
  sequence located in IL4 at 184-193 and may interact with Sequence 2615 in this patent.
EYSKDTLGRN

SEQ ID NO: 2617 - protein, 10 aa, Homo Sapiens
  sequence located in TFCOUP1 OR NR2F1 OR ERBAL3 OR EAR3 at 58-67 and may interact with Sequence 2618 in this patent.
PGAPATPGTA

SEQ ID NO: 2618 - protein, 10 aa, Homo Sapiens
  sequence located in KRT9 at 573-582 and may interact with Sequence 2617 in this patent.
GGSGSRGGSG

SEQ ID NO: 2619 - protein, 10 aa, Homo Sapiens
  sequence located in TFCOUP1 OR NR2F1 OR ERBAL3 OR EAR3 at 58-67 and may interact with Sequence 2620 in this patent.
PGAPATPGTA

SEQ ID NO: 2620 - protein, 10 aa, Homo Sapiens
  sequence located in KRT9 at 559-568 and may interact with Sequence 2619 in this patent.
GGSGSGGGSG

SEQ ID NO: 2621 - protein, 10 aa, Homo Sapiens
  sequence located in TFCOUP1 OR NR2F1 OR ERBAL3 OR EAR3 at 58-67 and may interact with Sequence 2622 in this patent.
PGAPATPGTA

SEQ ID NO: 2622 - protein, 10 aa, Homo Sapiens
  sequence located in KRT9 at 521-530 and may interact with Sequence 2621 in this patent.
GGSGSGGGSG

SEQ ID NO: 2623 - protein, 10 aa, Homo Sapiens
  sequence located in TFCOUP1 OR NR2F1 OR ERBAL3 OR EAR3 at 58-67 and may interact with Sequence 2624 in this patent.
PGAPATPGTA

SEQ ID NO: 2624 - protein, 10 aa, Homo Sapiens
  sequence located in KRT9 at 507-516 and may interact with Sequence 2623 in this patent.
GGSGSRGGSG

SEQ ID NO: 2625 - protein, 10 aa, Homo Sapiens
  sequence located in TFCOUP1 OR NR2F1 OR ERBAL3 OR EAR3 at 58-67 and may interact with Sequence 2626 in this patent.
PGAPATPGTA

SEQ ID NO: 2626 - protein, 10 aa, Homo Sapiens
  sequence located in KRT2E at 565-574 and may interact with Sequence 2625 in this patent.
GSTGGRGSSG

SEQ ID NO: 2627 - protein, 10 aa, Homo Sapiens
  sequence located in TFCOUP1 OR NR2F1 OR ERBAL3 OR EAR3 at 59-68 and may interact with Sequence 2628 in this patent.
GAPATPGTAG

SEQ ID NO: 2628 - protein, 10 aa, Homo Sapiens
  sequence located in KRT2E at 564-573 and may interact with Sequence 2627 in this patent.
SGSTGGRGSS

SEQ ID NO: 2629 - protein, 10 aa, Homo Sapiens
  sequence located in TFCOUP1 OR NR2F1 OR ERBAL3 OR EAR3 at 58-67 and may interact with Sequence 2630 in this patent.
PGAPATPGTA

SEQ ID NO: 2630 - protein, 10 aa, Homo Sapiens
  sequence located in KRT1 OR KRTA at 596-605 and may interact with Sequence 2629 in this patent.
GSSGGRGSGG

SEQ ID NO: 2631 - protein, 10 aa, Homo Sapiens
  sequence located in TFCOUP1 OR NR2F1 OR ERBAL3 OR EAR3 at 20-29 and may interact with Sequence 2632 in this patent.
PGGPNPAAQA

SEQ ID NO: 2632 - protein, 10 aa, Homo Sapiens
  sequence located in KRT6A OR K6A at 498-507 and may interact with Sequence 2631 in this patent.
GASGVGSGLG

SEQ ID NO: 2633 - protein, 10 aa, Homo Sapiens
  sequence located in TFCOUP1 OR NR2F1 OR ERBAL3 OR EAR3 at 20-29 and may interact with Sequence 2634 in this patent.
PGGPNPAAQA

SEQ ID NO: 2634 - protein, 10 aa, Homo Sapiens
  sequence located in KRT6B OR K6B at 498-507 and may interact with Sequence 2633 in this patent.
GASGVGSGLG

SEQ ID NO: 2635 - protein, 10 aa, Homo Sapiens
  sequence located in TFCOUP1 OR NR2F1 OR ERBAL3 OR EAR3 at 20-29 and may interact with Sequence 2636 in this patent.
PGGPNPAAQA

SEQ ID NO: 2636 - protein, 10 aa, Homo Sapiens
  sequence located in KRT6F at 498-507 and may interact with Sequence 2635 in this patent.
GASGVGSGLG

SEQ ID NO: 2637 - protein, 10 aa, Homo Sapiens
  sequence located in TFCOUP1 OR NR2F1 OR ERBAL3 OR EAR3 at 59-68 and may interact with Sequence 2638 in this patent.
GAPATPGTAG

SEQ ID NO: 2638 - protein, 10 aa, Homo Sapiens
  sequence located in CSF1R OR FMS at 929-938 and may interact with Sequence 2637 in this patent.
SSRSGGSGSS

SEQ ID NO: 2639 - protein, 10 aa, Homo Sapiens
  sequence located in TFCOUP1 OR NR2F1 OR ERBAL3 OR EAR3 at 59-68 and may interact with Sequence 2640 in this patent.
GAPATPGTAG

SEQ ID NO: 2640 - protein, 10 aa, Homo Sapiens
  sequence located in CSF1R OR FMS at 929-938 and may interact with Sequence 2639 in this patent.
SSRSGGSGSS

SEQ ID NO: 2641 - protein, 10 aa, Homo Sapiens
  sequence located in TFCOUP1 OR NR2F1 OR ERBAL3 OR EAR3 at 58-67 and may interact with Sequence 2642 in this patent.
PGAPATPGTA

SEQ ID NO: 2642 - protein, 10 aa, Homo Sapiens
  sequence located in ACVR1B OR ACVRLK4 at 133-142 and may interact with Sequence 2641 in this patent.
RSAGRGWGAG

SEQ ID NO: 2643 - protein, 10 aa, Homo Sapiens
  sequence located in TFCOUP1 OR NR2F1 OR ERBAL3 OR EAR3 at 271-280 and may interact with Sequence 2644 in this patent.
LHVAPLLAAA

SEQ ID NO: 2644 - protein, 10 aa, Homo Sapiens
  sequence located in LH2 at 17-26 and may interact with Sequence 2643 in this patent.
EMDRRQERGS

SEQ ID NO: 2645 - protein, 10 aa, Homo Sapiens
  sequence located in TFCOUP1 OR NR2F1 OR ERBAL3 OR EAR3 at 226-235 and may interact with Sequence 2646 in this patent.
LLFSAVEWAR

SEQ ID NO: 2646 - protein, 10 aa, Homo Sapiens
  sequence located in MFAP2 OR MAGP1 at 92-101 and may interact with Sequence 2645 in this patent.
PGPLDCREEQ

SEQ ID NO: 2647 - protein, 10 aa, Homo Sapiens
  sequence located in TFCOUP1 OR NR2F1 OR ERBAL3 OR EAR3 at 222-231 and may interact with Sequence 2648 in this patent.
LAARLLFSAV

SEQ ID NO: 2648 - protein, 10 aa, Homo Sapiens
  sequence located in NEFM OR NFM at 779-788 and may interact with Sequence 2647 in this patent.
EGGSEEEGSD

SEQ ID NO: 2649 - protein, 10 aa, Homo Sapiens
  sequence located in TFCOUP1 OR NR2F1 OR ERBAL3 OR EAR3 at 58-67 and may interact with Sequence 2650 in this patent.
PGAPATPGTA

SEQ ID NO: 2650 - protein, 10 aa, Homo Sapiens
  sequence located in OSBP at 82-91 and may interact with Sequence 2649 in this patent.
SGAGGSGSAR

SEQ ID NO: 2651 - protein, 10 aa, Homo Sapiens
  sequence located in TFCOUP1 OR NR2F1 OR ERBAL3 OR EAR3 at 58-67 and may interact with Sequence 2652 in this patent.
PGAPATPGTA

SEQ ID NO: 2652 - protein, 10 aa, Homo Sapiens
  sequence located in RYK at 4596-4605 and may interact with Sequence 2651 in this patent.
SGAGSGGSSG

SEQ ID NO: 2653 - protein, 10 aa, Homo Sapiens
  sequence located in TFCOUP1 OR NR2F1 OR ERBAL3 OR EAR3 at 58-67 and may interact with Sequence 2654 in this patent.
PGAPATPGTA

SEQ ID NO: 2654 - protein, 10 aa, Homo Sapiens
  sequence located in SFRS5 OR SRP40 OR HRS at 204-213 and may interact with Sequence 2653 in this patent.
SRSRSRRSSR

SEQ ID NO: 2655 - protein, 10 aa, Homo Sapiens
  sequence located in TFCOUP1 OR NR2F1 OR ERBAL3 OR EAR3 at 58-67 and may interact with Sequence 2656 in this patent.
PGAPATPGTA

SEQ ID NO: 2656 - protein, 10 aa, Homo Sapiens
  sequence located in SFRS5 OR SRP40 OR HRS at 196-205 and may interact with Sequence 2655 in this patent.
SRSRSRRRSR

SEQ ID NO: 2657 - protein, 10 aa, Homo Sapiens
  sequence located in TFCOUP1 OR NR2F1 OR ERBAL3 OR EAR3 at 58-67 and may interact with Sequence 2658 in this patent.
PGAPATPGTA

SEQ ID NO: 2658 - protein, 10 aa, Homo Sapiens
  sequence located in SFRS5 OR SRP40 OR HRS at 207-216 and may interact with Sequence 2657 in this patent.
RSRRSSRSRS

SEQ ID NO: 2659 - protein, 10 aa, Homo Sapiens
  sequence located in TFCOUP1 OR NR2F1 OR ERBAL3 OR EAR3 at 58-67 and may interact with Sequence 2660 in this patent.
PGAPATPGTA

SEQ ID NO: 2660 - protein, 10 aa, Homo Sapiens
  sequence located in SFRS5 OR SRP40 OR HRS at 199-208 and may interact with Sequence 2659 in this patent.
RSRRRSRSRS

SEQ ID NO: 2661 - protein, 10 aa, Homo Sapiens
  sequence located in TFCOUP1 OR NR2F1 OR ERBAL3 OR EAR3 at 59-68 and may interact with Sequence 2662 in this patent.
GAPATPGTAG

SEQ ID NO: 2662 - protein, 10 aa, Homo Sapiens
  sequence located in SPTA1 OR SPTA at 13-22 and may interact with Sequence 2661 in this patent.
SGGCSGAGGA

SEQ ID NO: 2663 - protein, 10 aa, Homo Sapiens
  sequence located in TFCOUP1 OR NR2F1 OR ERBAL3 OR EAR3 at 58-67 and may interact with Sequence 2664 in this patent.
PGAPATPGTA

SEQ ID NO: 2664 - protein, 10 aa, Homo Sapiens
  sequence located in SPTA1 OR SPTA at 12-21 and may interact with Sequence 2663 in this patent.
GSGGCSGAGG

SEQ ID NO: 2665 - protein, 10 aa, Homo Sapiens
  sequence located in TFCOUP1 OR NR2F1 OR ERBAL3 OR EAR3 at 63-72 and may interact with Sequence 2666 in this patent.
TPGTAGDKGQ

SEQ ID NO: 2666 - protein, 10 aa, Homo Sapiens
  sequence located in XDH OR XDHA at 371-380 and may interact with Sequence 2665 in this patent.
LTLVSRGTRR

SEQ ID NO: 2667 - protein, 10 aa, Homo Sapiens
  sequence located in TFCOUP1 OR NR2F1 OR ERBAL3 OR EAR3 at 59-68 and may interact with Sequence 2668 in this patent.
GAPATPGTAG

SEQ ID NO: 2668 - protein, 10 aa, Homo Sapiens
  sequence located in KIAA0218 at 43-52 and may interact with Sequence 2667 in this patent.
ASRSGGPSSP

SEQ ID NO: 2669 - protein, 10 aa, Homo Sapiens
  sequence located in CRHR2 OR CRF2R OR CRH2R at 219-228 and may interact with Sequence 2670 in this patent.
TERLRKCLFL

SEQ ID NO: 2670 - protein, 10 aa, Homo Sapiens
  sequence located in CTNNB1 OR CTNNB at 69-78 and may interact with Sequence 2669 in this patent.
GFSQSFTQEQ

SEQ ID NO: 2671 - protein, 10 aa, Homo Sapiens
  sequence located in CRHR2 OR CRF2R OR CRH2R at 345-354 and may interact with Sequence 2672 in this patent.
SFLQSFQGFF

SEQ ID NO: 2672 - protein, 10 aa, Homo Sapiens
  sequence located in DCTD at 78-87 and may interact with Sequence 2671 in this patent.
KKTLKGLQEA

SEQ ID NO: 2673 - protein, 10 aa, Homo Sapiens
  sequence located in CRHR2 OR CRF2R OR CRH2R at 51-60 and may interact with Sequence 2674 in this patent.
WPRSAAGALV

SEQ ID NO: 2674 - protein, 10 aa, Homo Sapiens
  sequence located in GATA3 at 170-179 and may interact with Sequence 2673 in this patent.
PGSAGSARQD

SEQ ID NO: 2675 - protein, 10 aa, Homo Sapiens
  sequence located in CRHR2 OR CRF2R OR CRH2R at 50-59 and may interact with Sequence 2676 in this patent.
CWPRSAAGAL

SEQ ID NO: 2676 - protein, 10 aa, Homo Sapiens
  sequence located in GATA3 at 169-178 and may interact with Sequence 2675 in this patent.
TPGSAGSARQ

SEQ ID NO: 2677 - protein, 10 aa, Homo Sapiens
  sequence located in CRHR2 OR CRF2R OR CRH2R at 49-58 and may interact with Sequence 2678 in this patent.
TCWPRSAAGA

SEQ ID NO: 2678 - protein, 10 aa, Homo Sapiens
  sequence located in GATA3 at 168-177 and may interact with Sequence 2677 in this patent.
STPGSAGSAR

SEQ ID NO: 2679 - protein, 10 aa, Homo Sapiens
  sequence located in CRHR2 OR CRF2R OR CRH2R at 53-62 and may interact with Sequence 2680 in this patent.
RSAAGALVER

SEQ ID NO: 2680 - protein, 10 aa, Homo Sapiens
  sequence located in IRS1 at 1218-1227 and may interact with Sequence 2679 in this patent.
STRRSSEDLS

SEQ ID NO: 2681 - protein, 10 aa, Homo Sapiens
  sequence located in CRHR2 OR CRF2R OR CRH2R at 392-401 and may interact with Sequence 2682 in this patent.
SIPTSPTRIS

SEQ ID NO: 2682 - protein, 10 aa, Homo Sapiens
  sequence located in KRT1 OR KRTA at 523-532 and may interact with Sequence 2681 in this patent.
GYGSGGSSYG

SEQ ID NO: 2683 - protein, 10 aa, Homo Sapiens
  sequence located in CRHR2 OR CRF2R OR CRH2R at 252-261 and may interact with Sequence 2684 in this patent.
EQCWFGKEPG

SEQ ID NO: 2684 - protein, 10 aa, Homo Sapiens
  sequence located in NEUROD2 at 3-12 and may interact with Sequence 2683 in this patent.
TRLFSEPGLL

SEQ ID NO: 2685 - protein, 10 aa, Homo Sapiens
  sequence located in CRHR2 OR CRF2R OR CRH2R at 399-408 and may interact with Sequence 2686 in this patent.
RISFHSIKQT

SEQ ID NO: 2686 - protein, 10 aa, Homo Sapiens
  sequence located in GRIN2C at 310-319 and may interact with Sequence 2685 in this patent.
ANGEVTDFLS

SEQ ID NO: 2687 - protein, 10 aa, Homo Sapiens
  sequence located in CRHR2 OR CRF2R OR CRH2R at 49-58 and may interact with Sequence 2688 in this patent.
TCWPRSAAGA

SEQ ID NO: 2688 - protein, 10 aa, Homo Sapiens
  sequence located in NRTN at 82-91 and may interact with Sequence 2687 in this patent.
GPRRRAGPRR

SEQ ID NO: 2689 - protein, 10 aa, Homo Sapiens
  sequence located in CRHR2 OR CRF2R OR CRH2R at 139-148 and may interact with Sequence 2690 in this patent.
LALRSIRCLR

SEQ ID NO: 2690 - protein, 10 aa, Homo Sapiens
  sequence located in PTPRG at 347-356 and may interact with Sequence 2689 in this patent.
SQAANGTEGQ

SEQ ID NO: 2691 - protein, 10 aa, Homo Sapiens
  sequence located in CRHR2 OR CRF2R OR CRH2R at 140-149 and may interact with Sequence 2692 in this patent.
ALRSIRCLRN

SEQ ID NO: 2692 - protein, 10 aa, Homo Sapiens
  sequence located in PTPRG at 520-529 and may interact with Sequence 2691 in this patent.
VPKGPNGTEG

SEQ ID NO: 2693 - protein, 10 aa, Homo Sapiens
  sequence located in CRHR2 OR CRF2R OR CRH2R at 125-134 and may interact with Sequence 2694 in this patent.
CVSVAALVAA

SEQ ID NO: 2694 - protein, 10 aa, Homo Sapiens
  sequence located in RORB OR NR1F2 OR RZRB at 57-66 and may interact with Sequence 2693 in this patent.
TNRNRCQHCR

SEQ ID NO: 2695 - protein, 10 aa, Homo Sapiens
  sequence located in CRHR2 OR CRF2R OR CRH2R at 388-397 and may interact with Sequence 2696 in this patent.
ARAMSIPTSP

SEQ ID NO: 2696 - protein, 10 aa, Homo Sapiens
  sequence located in SSFA2 OR CS1 at 107-116 and may interact with Sequence 2695 in this patent.
GPSHANRRTG

SEQ ID NO: 2697 - protein, 10 aa, Homo Sapiens
  sequence located in CRHR2 OR CRF2R OR CRH2R at 49-58 and may interact with Sequence 2698 in this patent.
TCWPRSAAGA

SEQ ID NO: 2698 - protein, 10 aa, Homo Sapiens
  sequence located in VIM at 15-24 and may interact with Sequence 2697 in this patent.
GGPGTASRPS

SEQ ID NO: 2699 - protein, 10 aa, Homo Sapiens
  sequence located in CRHR2 OR CRF2R OR CRH2R at 388-397 and may interact with Sequence 2700 in this patent.
ARAMSIPTSP

SEQ ID NO: 2700 - protein, 10 aa, Homo Sapiens
  sequence located in KIAA0029 at 829-838 and may interact with Sequence 2699 in this patent.
GSRHGNRGRR

SEQ ID NO: 2701 - protein, 10 aa, Homo Sapiens
  sequence located in CRHR2 OR CRF2R OR CRH2R at 132-141 and may interact with Sequence 2702 in this patent.
VAAFLLFLAL

SEQ ID NO: 2702 - protein, 10 aa, Homo Sapiens
  sequence located in ZNF32 OR KOX30 at 49-58 and may interact with Sequence 2701 in this patent.
DGSEEEEKGQ

SEQ ID NO: 2703 - protein, 10 aa, Homo Sapiens
  sequence located in CRHR1 OR CRHR OR CRFR at 378-387 and may interact with Sequence 2704 in this patent.
SFLESFQGFF

SEQ ID NO: 2704 - protein, 10 aa, Homo Sapiens
  sequence located in DCTD at 78-87 and may interact with Sequence 2703 in this patent.
KKTLKGLQEA

SEQ ID NO: 2705 - protein, 10 aa, Homo Sapiens
  sequence located in CRHR1 OR CRHR OR CRFR at 140-149 and may interact with Sequence 2706 in this patent.
LFLRLRPGCT

SEQ ID NO: 2706 - protein, 10 aa, Homo Sapiens
  sequence located in FEN1 at 365-374 and may interact with Sequence 2705 in this patent.
KKKAKTGAAG

SEQ ID NO: 2707 - protein, 10 aa, Homo Sapiens
  sequence located in CRHR1 OR CRHR OR CRFR at 425-434 and may interact with Sequence 2708 in this patent.
SIPTSPTRVS

SEQ ID NO: 2708 - protein, 10 aa, Homo Sapiens
  sequence located in KRT1 OR KRTA at 523-532 and may interact with Sequence 2707 in this patent.
GYGSGGSSYG

SEQ ID NO: 2709 - protein, 10 aa, Homo Sapiens
  sequence located in CRHR1 OR CRHR OR CRFR at 82-91 and may interact with Sequence 2710 in this patent.
NGYRECLANG

SEQ ID NO: 2710 - protein, 10 aa, Homo Sapiens
  sequence located in LIPC OR HTGL at 386-395 and may interact with Sequence 2709 in this patent.
IPITLGKGIA

SEQ ID NO: 2711 - protein, 10 aa, Homo Sapiens
  sequence located in CRHR1 OR CRHR OR CRFR at 140-149 and may interact with Sequence 2712 in this patent.
LFLRLRPGCT

SEQ ID NO: 2712 - protein, 10 aa, Homo Sapiens
  sequence located in MYH7 OR MYHCB at 1127-1136 and may interact with Sequence 2711 in this patent.
RATRAKTEKQ

SEQ ID NO: 2713 - protein, 10 aa, Homo Sapiens
  sequence located in CRHR1 OR CRHR OR CRFR at 50-59 and may interact with Sequence 2714 in this patent.
LIGTCWPRSP

SEQ ID NO: 2714 - protein, 10 aa, Homo Sapiens
  sequence located in RPL15 at 37-46 and may interact with Sequence 2713 in this patent.
RAPRPTRPDK

SEQ ID NO: 2715 - protein, 10 aa, Homo Sapiens
  sequence located in CRHR1 OR CRHR OR CRFR at 87-96 and may interact with Sequence 2716 in this patent.
CLANGSWAAR

SEQ ID NO: 2716 - protein, 10 aa, Homo Sapiens
  sequence located in SRM OR SPS1 at 10-19 and may interact with Sequence 2715 in this patent.
ASGPAAIREG

SEQ ID NO: 2717 - protein, 10 aa, Homo Sapiens
  sequence located in CRHR1 OR CRHR OR CRFR at 421-430 and may interact with Sequence 2718 in this patent.
ARAMSIPTSP

SEQ ID NO: 2718 - protein, 10 aa, Homo Sapiens
  sequence located in SSFA2 OR CS1 at 107-116 and may interact with Sequence 2717 in this patent.
GPSHANRRTG

SEQ ID NO: 2719 - protein, 10 aa, Homo Sapiens
  sequence located in CRHR1 OR CRHR OR CRFR at 421-430 and may interact with Sequence 2720 in this patent.
ARAMSIPTSP

SEQ ID NO: 2720 - protein, 10 aa, Homo Sapiens
  sequence located in KIAA0029 at 829-838 and may interact with Sequence 2719 in this patent.
GSRHGNRGRR

SEQ ID NO: 2721 - protein, 10 aa, Homo Sapiens
  sequence located in CTGF at 292-301 and may interact with Sequence 2722 in this patent.
CCTPHRTTTL

SEQ ID NO: 2722 - protein, 10 aa, Homo Sapiens
  sequence located in DAG1 at 483-492 and may interact with Sequence 2721 in this patent.
TTSGVPRGGE

SEQ ID NO: 2723 - protein, 10 aa, Homo Sapiens
  sequence located in CTGF at 291-300 and may interact with Sequence 2724 in this patent.
RCCTPHRTTT

SEQ ID NO: 2724 - protein, 10 aa, Homo Sapiens
  sequence located in DAG1 at 482-491 and may interact with Sequence 2723 in this patent.
TTTSGVPRGG

SEQ ID NO: 2725 - protein, 10 aa, Homo Sapiens
  sequence located in CTGF at 287-296 and may interact with Sequence 2726 in this patent.
CTDGRCCTPH

SEQ ID NO: 2726 - protein, 10 aa, Homo Sapiens
  sequence located in GLUD2 OR GLUDP1 at 267-276 and may interact with Sequence 2725 in this patent.
GRISATGRGV

SEQ ID NO: 2727 - protein, 10 aa, Homo Sapiens
  sequence located in CTGF at 286-295 and may interact with Sequence 2728 in this patent.
VCTDGRCCTP

SEQ ID NO: 2728 - protein, 10 aa, Homo Sapiens
  sequence located in GLUD2 OR GLUDP1 at 266-275 and may interact with Sequence 2727 in this patent.
HGRISATGRG

SEQ ID NO: 2729 - protein, 10 aa, Homo Sapiens
  sequence located in CTGF at 285-294 and may interact with Sequence 2730 in this patent.
GVCTDGRCCT

SEQ ID NO: 2730 - protein, 10 aa, Homo Sapiens
  sequence located in MLL OR HRX OR ALL1 OR TRX1 OR HTRX at 2726-2735 and may interact with Sequence 2729 in this patent.
SDTSVTATTR

SEQ ID NO: 2731 - protein, 10 aa, Homo Sapiens
  sequence located in CTGF at 279-288 and may interact with Sequence 2732 in this patent.
YRAKFCGVCT

SEQ ID NO: 2732 - protein, 10 aa, Homo Sapiens
  sequence located in IFI16 OR IFNGIP1 at 688-697 and may interact with Sequence 2731 in this patent.
SGNTGELRSV

SEQ ID NO: 2733 - protein, 10 aa, Homo Sapiens
  sequence located in CTGF at 227-236 and may interact with Sequence 2734 in this patent.
SCRLEKQSRL

SEQ ID NO: 2734 - protein, 10 aa, Homo Sapiens
  sequence located in CDC2L1 OR PK58 at 245-254 and may interact with Sequence 2733 in this patent.
RAPELLLGAK

SEQ ID NO: 2735 - protein, 10 aa, Homo Sapiens
  sequence located in CTGF at 29-38 and may interact with Sequence 2736 in this patent.
CSGPCRCPDE

SEQ ID NO: 2736 - protein, 10 aa, Homo Sapiens
  sequence located in PKM2 OR PKM at 28-37 and may interact with Sequence 2735 in this patent.
LIGAPGGPAG

SEQ ID NO: 2737 - protein, 10 aa, Homo Sapiens
  sequence located in CTGF at 27-36 and may interact with Sequence 2738 in this patent.
QNCSGPCRCP

SEQ ID NO: 2738 - protein, 10 aa, Homo Sapiens
  sequence located in PKM2 OR PKM at 28-37 and may interact with Sequence 2737 in this patent.
LIGAPGGPAG

SEQ ID NO: 2739 - protein, 10 aa, Homo Sapiens
  sequence located in CTGF at 39-48 and may interact with Sequence 2740 in this patent.
PAPRCPAGVS

SEQ ID NO: 2740 - protein, 10 aa, Homo Sapiens
  sequence located in Unknown at 188-197 and may interact with Sequence 2739 in this patent.
GYSGGGSGGG

SEQ ID NO: 2741 - protein, 10 aa, Homo Sapiens
  sequence located in CTGF at 285-294 and may interact with Sequence 2742 in this patent.
GVCTDGRCCT

SEQ ID NO: 2742 - protein, 10 aa, Homo Sapiens
  sequence located in Unknown at 160-169 and may interact with Sequence 2741 in this patent.
SYGGVSSGGS

SEQ ID NO: 2743 - protein, 10 aa, Homo Sapiens
  sequence located in CTGF at 59-68 and may interact with Sequence 2744 in this patent.
VCAKQLGELC

SEQ ID NO: 2744 - protein, 10 aa, Homo Sapiens
  sequence located in LCT OR LPH at 113-122 and may interact with Sequence 2743 in this patent.
YRRLLKALKT

SEQ ID NO: 2745 - protein, 10 aa, Homo Sapiens
  sequence located in CTGF at 34-43 and may interact with Sequence 2746 in this patent.
RCPDEPAPRC

SEQ ID NO: 2746 - protein, 10 aa, Homo Sapiens
  sequence located in Unknown at 97-106 and may interact with Sequence 2745 in this patent.
STRVFGGGTR

SEQ ID NO: 2747 - protein, 10 aa, Homo Sapiens
  sequence located in CTGF at 106-115 and may interact with Sequence 2748 in this patent.
GGTVYRSGES

SEQ ID NO: 2748 - protein, 10 aa, Homo Sapiens
  sequence located in Unknown at 62-71 and may interact with Sequence 2747 in this patent.
RFSGSIDSSS

SEQ ID NO: 2749 - protein, 10 aa, Homo Sapiens
  sequence located in CTGF at 106-115 and may interact with Sequence 2750 in this patent.
GGTVYRSGES

SEQ ID NO: 2750 - protein, 10 aa, Homo Sapiens
  sequence located in Unknown at 81-90 and may interact with Sequence 2749 in this patent.
RFSGSIDSSS

SEQ ID NO: 2751 - protein, 10 aa, Homo Sapiens
  sequence located in CTGF at 54-63 and may interact with Sequence 2752 in this patent.
CGCCRVCAKQ

SEQ ID NO: 2752 - protein, 10 aa, Homo Sapiens
  sequence located in SLC9A3 OR NHE3 at 5-14 and may interact with Sequence 2751 in this patent.
GARGPDRGLL

SEQ ID NO: 2753 - protein, 10 aa, Homo Sapiens
  sequence located in CTGF at 12-21 and may interact with Sequence 2754 in this patent.
AFVVLLALCS

SEQ ID NO: 2754 - protein, 10 aa, Homo Sapiens
  sequence located in CHGB OR SCG1 at 170-179 and may interact with Sequence 2753 in this patent.
GENYQKGERG

SEQ ID NO: 2755 - protein, 10 aa, Homo Sapiens
  sequence located in CTGF at 291-300 and may interact with Sequence 2756 in this patent.
RCCTPHRTTT

SEQ ID NO: 2756 - protein, 10 aa, Homo Sapiens
  sequence located in GH2 at 932-941 and may interact with Sequence 2755 in this patent.
RSRSVGRRRS

SEQ ID NO: 2757 - protein, 10 aa, Homo Sapiens
  sequence located in CTGF at 48-57 and may interact with Sequence 2758 in this patent.
SLVLDGCGCC

SEQ ID NO: 2758 - protein, 10 aa, Homo Sapiens
  sequence located in SP2 at 30-39 and may interact with Sequence 2757 in this patent.
ATPTTIKDEA

SEQ ID NO: 2759 - protein, 10 aa, Homo Sapiens
  sequence located in CTGF at 49-58 and may interact with Sequence 2760 in this patent.
LVLDGCGCCR

SEQ ID NO: 2760 - protein, 10 aa, Homo Sapiens
  sequence located in SP2 at 29-38 and may interact with Sequence 2759 in this patent.
SATPTTIKDE

SEQ ID NO: 2761 - protein, 10 aa, Homo Sapiens
  sequence located in CTGF at 53-62 and may interact with Sequence 2762 in this patent.
GCGCCRVCAK

SEQ ID NO: 2762 - protein, 10 aa, Homo Sapiens
  sequence located in VAMP3 OR SYB3 at 6-15 and may interact with Sequence 2761 in this patent.
TAATGSNRRL

SEQ ID NO: 2763 - protein, 10 aa, Homo Sapiens
  sequence located in CTGF at 155-164 and may interact with Sequence 2764 in this patent.
KLPGKCCEEW

SEQ ID NO: 2764 - protein, 10 aa, Homo Sapiens
  sequence located in TAP1 OR PSF1 OR RING4 OR Y3 at 23-32 and may interact with Sequence 2763 in this patent.
LQGPLGTLLP

SEQ ID NO: 2765 - protein, 10 aa, Homo Sapiens
  sequence located in GUCY1B3 OR GUC1B3 OR GUCSB3 at 55-64 and may interact with Sequence 2766 in this patent.
VSACPVKKSH

SEQ ID NO: 2766 - protein, 10 aa, Homo Sapiens
  sequence located in TIE1 OR TIE at 709-718 and may interact with Sequence 2765 in this patent.
NASTRYLFRM

SEQ ID NO: 2767 - protein, 10 aa, Homo Sapiens
  sequence located in GUCY2D OR GUC2D OR RETGC1 OR RETGC OR GUC1A4 OR CORD6 at 368-377 and may interact with Sequence 2768 in this patent.
AGGRWVSGAA

SEQ ID NO: 2768 - protein, 10 aa, Homo Sapiens
  sequence located in DCC at 212-221 and may interact with Sequence 2767 in this patent.
CSARNPASSR

SEQ ID NO: 2769 - protein, 10 aa, Homo Sapiens
  sequence located in GUCY2D OR GUC2D OR RETGC1 OR RETGC OR GUC1A4 OR CORD6 at 223-232 and may interact with Sequence 2770 in this patent.
LSGAREALRK

SEQ ID NO: 2770 - protein, 10 aa, Homo Sapiens
  sequence located in POLE1 OR POLE at 466-475 and may interact with Sequence 2769 in this patent.
KGSGTLCEAL

SEQ ID NO: 2771 - protein, 10 aa, Homo Sapiens
  sequence located in GUCY2D OR GUC2D OR RETGC1 OR RETGC OR GUC1A4 OR CORD6 at 298-307 and may interact with Sequence 2772 in this patent.
SSQLRRAHDA

SEQ ID NO: 2772 - protein, 10 aa, Homo Sapiens
  sequence located in POLG OR MDP1 at 638-647 and may interact with Sequence 2771 in this patent.
TTLESAGVVC

SEQ ID NO: 2773 - protein, 10 aa, Homo Sapiens
  sequence located in GUCY2D OR GUC2D OR RETGC1 OR RETGC OR GUC1A4 OR CORD6 at 713-722 and may interact with Sequence 2774 in this patent.
LLRDPALERR

SEQ ID NO: 2774 - protein, 10 aa, Homo Sapiens
  sequence located in DPYS at 498-507 and may interact with Sequence 2773 in this patent.
ATLKSRVTKE

SEQ ID NO: 2775 - protein, 10 aa, Homo Sapiens
  sequence located in GUCY2D OR GUC2D OR RETGC1 OR RETGC OR GUC1A4 OR CORD6 at 2-11 and may interact with Sequence 2776 in this patent.
TACARRAGGL

SEQ ID NO: 2776 - protein, 10 aa, Homo Sapiens
  sequence located in DSG2 at 745-754 and may interact with Sequence 2775 in this patent.
KTARATGASR

SEQ ID NO: 2777 - protein, 10 aa, Homo Sapiens
  sequence located in GUCY2D OR GUC2D OR RETGC1 OR RETGC OR GUC1A4 OR CORD6 at 2-11 and may interact with Sequence 2778 in this patent.
TACARRAGGL

SEQ ID NO: 2778 - protein, 10 aa, Homo Sapiens
  sequence located in E2F1 OR RBBP3 at 103-112 and may interact with Sequence 2777 in this patent.
ESSGPARGRG

SEQ ID NO: 2779 - protein, 10 aa, Homo Sapiens
  sequence located in GUCY2D OR GUC2D OR RETGC1 OR RETGC OR GUC1A4 OR CORD6 at 139-148 and may interact with Sequence 2780 in this patent.
LAEEAGIALV

SEQ ID NO: 2780 - protein, 10 aa, Homo Sapiens
  sequence located in EMR1 at 60-69 and may interact with Sequence 2779 in this patent.
QGFLSSNGQN

SEQ ID NO: 2781 - protein, 10 aa, Homo Sapiens
  sequence located in GUCY2D OR GUC2D OR RETGC1 OR RETGC OR GUC1A4 OR CORD6 at 138-147 and may interact with Sequence 2782 in this patent.
LLAEEAGIAL

SEQ ID NO: 2782 - protein, 10 aa, Homo Sapiens
  sequence located in EMR1 at 59-68 and may interact with Sequence 2781 in this patent.
KQGFLSSNGQ

SEQ ID NO: 2783 - protein, 10 aa, Homo Sapiens
  sequence located in GUCY2D OR GUC2D OR RETGC1 OR RETGC OR GUC1A4 OR CORD6 at 200-209 and may interact with Sequence 2784 in this patent.
SLSTALRARG

SEQ ID NO: 2784 - protein, 10 aa, Homo Sapiens
  sequence located in EPHB4 OR HTK at 281-290 and may interact with Sequence 2783 in this patent.
GEGSCQPCPA

SEQ ID NO: 2785 - protein, 10 aa, Homo Sapiens
  sequence located in GUCY2D OR GUC2D OR RETGC1 OR RETGC OR GUC1A4 OR CORD6 at 199-208 and may interact with Sequence 2786 in this patent.
RSLSTALRAR

SEQ ID NO: 2786 - protein, 10 aa, Homo Sapiens
  sequence located in EPHB4 OR HTK at 280-289 and may interact with Sequence 2785 in this patent.
SGEGSCQPCP

SEQ ID NO: 2787 - protein, 10 aa, Homo Sapiens
  sequence located in GUCY2D OR GUC2D OR RETGC1 OR RETGC OR GUC1A4 OR CORD6 at 526-535 and may interact with Sequence 2788 in this patent.
GSRSSLGARS

SEQ ID NO: 2788 - protein, 10 aa, Homo Sapiens
  sequence located in FBLN2 at 327-336 and may interact with Sequence 2787 in this patent.
GARAEAGARP

SEQ ID NO: 2789 - protein, 10 aa, Homo Sapiens
  sequence located in GUCY2D OR GUC2D OR RETGC1 OR RETGC OR GUC1A4 OR CORD6 at 526-535 and may interact with Sequence 2790 in this patent.
GSRSSLGARS

SEQ ID NO: 2790 - protein, 10 aa, Homo Sapiens
  sequence located in FBLN2 at 326-335 and may interact with Sequence 2789 in this patent.
AGARAEAGAR

SEQ ID NO: 2791 - protein, 10 aa, Homo Sapiens
  sequence located in GUCY2D OR GUC2D OR RETGC1 OR RETGC OR GUC1A4 OR CORD6 at 288-297 and may interact with Sequence 2792 in this patent.
GPEALAALAN

SEQ ID NO: 2792 - protein, 10 aa, Homo Sapiens
  sequence located in FBN1 OR FBN at 1614-1623 and may interact with Sequence 2791 in this patent.
PGLCQGGKCI

SEQ ID NO: 2793 - protein, 10 aa, Homo Sapiens
  sequence located in GUCY2D OR GUC2D OR RETGC1 OR RETGC OR GUC1A4 OR CORD6 at 970-979 and may interact with Sequence 2794 in this patent.
EVPVRIRIGL

SEQ ID NO: 2794 - protein, 10 aa, Homo Sapiens
  sequence located in CCKBR OR CCKRB at 251-260 and may interact with Sequence 2793 in this patent.
FDGDSDSDSQ

SEQ ID NO: 2795 - protein, 10 aa, Homo Sapiens
  sequence located in GUCY2D OR GUC2D OR RETGC1 OR RETGC OR GUC1A4 OR CORD6 at 969-978 and may interact with Sequence 2796 in this patent.
PEVPVRIRIG

SEQ ID NO: 2796 - protein, 10 aa, Homo Sapiens
  sequence located in CCKBR OR CCKRB at 250-259 and may interact with Sequence 2795 in this patent.
RFDGDSDSDS

SEQ ID NO: 2797 - protein, 10 aa, Homo Sapiens
  sequence located in GUCY2D OR GUC2D OR RETGC1 OR RETGC OR GUC1A4 OR CORD6 at 159-168 and may interact with Sequence 2798 in this patent.
GTTAPAVTPA

SEQ ID NO: 2798 - protein, 10 aa, Homo Sapiens
  sequence located in GCS1 at 28-37 and may interact with Sequence 2797 in this patent.
GRRDGRGGGP

SEQ ID NO: 2799 - protein, 10 aa, Homo Sapiens
  sequence located in GUCY2D OR GUC2D OR RETGC1 OR RETGC OR GUC1A4 OR CORD6 at 520-529 and may interact with Sequence 2800 in this patent.
SRKVAQGSRS

SEQ ID NO: 2800 - protein, 10 aa, Homo Sapiens
  sequence located in GLI1 OR GLI at 359-368 and may interact with Sequence 2799 in this patent.
GPGSLGDLTA

SEQ ID NO: 2801 - protein, 10 aa, Homo Sapiens
  sequence located in GUCY2D OR GUC2D OR RETGC1 OR RETGC OR GUC1A4 OR CORD6 at 521-530 and may interact with Sequence 2802 in this patent.
RKVAQGSRSS

SEQ ID NO: 2802 - protein, 10 aa, Homo Sapiens
  sequence located in GLI1 OR GLI at 358-367 and may interact with Sequence 2801 in this patent.
TGPGSLGDLT

SEQ ID NO: 2803 - protein, 10 aa, Homo Sapiens
  sequence located in GUCY2D OR GUC2D OR RETGC1 OR RETGC OR GUC1A4 OR CORD6 at 159-168 and may interact with Sequence 2804 in this patent.
GTTAPAVTPA

SEQ ID NO: 2804 - protein, 10 aa, Homo Sapiens
  sequence located in PRM2 at 85-94 and may interact with Sequence 2803 in this patent.
RRRHRRGCRT

SEQ ID NO: 2805 - protein, 10 aa, Homo Sapiens
  sequence located in GUCY2D OR GUC2D OR RETGC1 OR RETGC OR GUC1A4 OR CORD6 at 289-298 and may interact with Sequence 2806 in this patent.
PEALAALANS

SEQ ID NO: 2806 - protein, 10 aa, Homo Sapiens
  sequence located in ITBA4 at 116-125 and may interact with Sequence 2805 in this patent.
GLGKSGEGIR

SEQ ID NO: 2807 - protein, 10 aa, Homo Sapiens
  sequence located in GUCY2D OR GUC2D OR RETGC1 OR RETGC OR GUC1A4 OR CORD6 at 104-113 and may interact with Sequence 2808 in this patent.
PCRTPGSLGA

SEQ ID NO: 2808 - protein, 10 aa, Homo Sapiens
  sequence located in Unknown at 47-56 and may interact with Sequence 2807 in this patent.
GGPRWSTEAR

SEQ ID NO: 2809 - protein, 10 aa, Homo Sapiens
  sequence located in GUCY2D OR GUC2D OR RETGC1 OR RETGC OR GUC1A4 OR CORD6 at 525-534 and may interact with Sequence 2810 in this patent.
QGSRSSLGAR

SEQ ID NO: 2810 - protein, 10 aa, Homo Sapiens
  sequence located in ITGAE at 58-67 and may interact with Sequence 2809 in this patent.
PRTKRTPGPL

SEQ ID NO: 2811 - protein, 10 aa, Homo Sapiens
  sequence located in GUCY2D OR GUC2D OR RETGC1 OR RETGC OR GUC1A4 OR CORD6 at 6-15 and may interact with Sequence 2812 in this patent.
RRAGGLPDPG

SEQ ID NO: 2812 - protein, 10 aa, Homo Sapiens
  sequence located in ITGAE at 625-634 and may interact with Sequence 2811 in this patent.
SASPSQRIRA

SEQ ID NO: 2813 - protein, 10 aa, Homo Sapiens
  sequence located in GUCY2D OR GUC2D OR RETGC1 OR RETGC OR GUC1A4 OR CORD6 at 658-667 and may interact with Sequence 2814 in this patent.
HHRGVAHGRL

SEQ ID NO: 2814 - protein, 10 aa, Homo Sapiens
  sequence located in ITGAM OR CR3A OR CD11B at 928-937 and may interact with Sequence 2813 in this patent.
VVTSHGVSTK

SEQ ID NO: 2815 - protein, 10 aa, Homo Sapiens
  sequence located in GUCY2D OR GUC2D OR RETGC1 OR RETGC OR GUC1A4 OR CORD6 at 718-727 and may interact with Sequence 2816 in this patent.
ALERRGTLAG

SEQ ID NO: 2816 - protein, 10 aa, Homo Sapiens
  sequence located in ITM2A OR DJ696H22.1 at 354-363 and may interact with Sequence 2815 in this patent.
SSESPASLKR

SEQ ID NO: 2817 - protein, 10 aa, Homo Sapiens
  sequence located in GUCY2D OR GUC2D OR RETGC1 OR RETGC OR GUC1A4 OR CORD6 at 159-168 and may interact with Sequence 2818 in this patent.
GTTAPAVTPA

SEQ ID NO: 2818 - protein, 10 aa, Homo Sapiens
  sequence located in KRT9 at 568-577 and may interact with Sequence 2817 in this patent.
GGGYGGGSGS

SEQ ID NO: 2819 - protein, 10 aa, Homo Sapiens
  sequence located in GUCY2D OR GUC2D OR RETGC1 OR RETGC OR GUC1A4 OR CORD6 at 159-168 and may interact with Sequence 2820 in this patent.
GTTAPAVTPA

SEQ ID NO: 2820 - protein, 10 aa, Homo Sapiens
  sequence located in KRT9 at 516-525 and may interact with Sequence 2819 in this patent.
GGSYGGGSGS

SEQ ID NO: 2821 - protein, 10 aa, Homo Sapiens
  sequence located in GUCY2D OR GUC2D OR RETGC1 OR RETGC OR GUC1A4 OR CORD6 at 159-168 and may interact with Sequence 2822 in this patent.
GTTAPAVTPA

SEQ ID NO: 2822 - protein, 10 aa, Homo Sapiens
  sequence located in KRT9 at 502-511 and may interact with Sequence 2821 in this patent.
GGGYGGGSGS

SEQ ID NO: 2823 - protein, 10 aa, Homo Sapiens
  sequence located in GUCY2D OR GUC2D OR RETGC1 OR RETGC OR GUC1A4 OR CORD6 at 160-169 and may interact with Sequence 2824 in this patent.
TTAPAVTPAA

SEQ ID NO: 2824 - protein, 10 aa, Homo Sapiens
  sequence located in KRT9 at 608-617 and may interact with Sequence 2823 in this patent.
SGGGYGGGSG

SEQ ID NO: 2825 - protein, 10 aa, Homo Sapiens
  sequence located in GUCY2D OR GUC2D OR RETGC1 OR RETGC OR GUC1A4 OR CORD6 at 160-169 and may interact with Sequence 2826 in this patent.
TTAPAVTPAA

SEQ ID NO: 2826 - protein, 10 aa, Homo Sapiens
  sequence located in KRT9 at 581-590 and may interact with Sequence 2825 in this patent.
SGGSHGGGSG

SEQ ID NO: 2827 - protein, 10 aa, Homo Sapiens
  sequence located in GUCY2D OR GUC2D OR RETGC1 OR RETGC OR GUC1A4 OR CORD6 at 160-169 and may interact with Sequence 2828 in this patent.
TTAPAVTPAA

SEQ ID NO: 2828 - protein, 10 aa, Homo Sapiens
  sequence located in KRT9 at 567-576 and may interact with Sequence 2827 in this patent.
SGGGYGGGSG

SEQ ID NO: 2829 - protein, 10 aa, Homo Sapiens
  sequence located in GUCY2D OR GUC2D OR RETGC1 OR RETGC OR GUC1A4 OR CORD6 at 160-169 and may interact with Sequence 2830 in this patent.
TTAPAVTPAA

SEQ ID NO: 2830 - protein, 10 aa, Homo Sapiens
  sequence located in KRT9 at 545-554 and may interact with Sequence 2829 in this patent.
SGGGHSGGSG

SEQ ID NO: 2831 - protein, 10 aa, Homo Sapiens
  sequence located in GUCY2D OR GUC2D OR RETGC1 OR RETGC OR GUC1A4 OR CORD6 at 160-169 and may interact with Sequence 2832 in this patent.
TTAPAVTPAA

SEQ ID NO: 2832 - protein, 10 aa, Homo Sapiens
  sequence located in KRT9 at 537-546 and may interact with Sequence 2831 in this patent.
SGGGHSGGSG

SEQ ID NO: 2833 - protein, 10 aa, Homo Sapiens
  sequence located in GUCY2D OR GUC2D OR RETGC1 OR RETGC OR GUC1A4 OR CORD6 at 160-169 and may interact with Sequence 2834 in this patent.
TTAPAVTPAA

SEQ ID NO: 2834 - protein, 10 aa, Homo Sapiens
  sequence located in KRT9 at 529-538 and may interact with Sequence 2833 in this patent.
SGGGYGGGSG

SEQ ID NO: 2835 - protein, 10 aa, Homo Sapiens
  sequence located in GUCY2D OR GUC2D OR RETGC1 OR RETGC OR GUC1A4 OR CORD6 at 160-169 and may interact with Sequence 2836 in this patent.
TTAPAVTPAA

SEQ ID NO: 2836 - protein, 10 aa, Homo Sapiens
  sequence located in KRT9 at 515-524 and may interact with Sequence 2835 in this patent.
SGGSYGGGSG

SEQ ID NO: 2837 - protein, 10 aa, Homo Sapiens
  sequence located in GUCY2D OR GUC2D OR RETGC1 OR RETGC OR GUC1A4 OR CORD6 at 160-169 and may interact with Sequence 2838 in this patent.
TTAPAVTPAA

SEQ ID NO: 2838 - protein, 10 aa, Homo Sapiens
  sequence located in KRT9 at 501-510 and may interact with Sequence 2837 in this patent.
SGGGYGGGSG

SEQ ID NO: 2839 - protein, 10 aa, Homo Sapiens
  sequence located in GUCY2D OR GUC2D OR RETGC1 OR RETGC OR GUC1A4 OR CORD6 at 160-169 and may interact with Sequence 2840 in this patent.
TTAPAVTPAA

SEQ ID NO: 2840 - protein, 10 aa, Homo Sapiens
  sequence located in KRT9 at 480-489 and may interact with Sequence 2839 in this patent.
SGGSYGRGSR

SEQ ID NO: 2841 - protein, 10 aa, Homo Sapiens
  sequence located in GUCY2D OR GUC2D OR RETGC1 OR RETGC OR GUC1A4 OR CORD6 at 160-169 and may interact with Sequence 2842 in this patent.
TTAPAVTPAA

SEQ ID NO: 2842 - protein, 10 aa, Homo Sapiens
  sequence located in KRT9 at 607-616 and may interact with Sequence 2841 in this patent.
GSGGGYGGGS

SEQ ID NO: 2843 - protein, 10 aa, Homo Sapiens
  sequence located in GUCY2D OR GUC2D OR RETGC1 OR RETGC OR GUC1A4 OR CORD6 at 160-169 and may interact with Sequence 2844 in this patent.
TTAPAVTPAA

SEQ ID NO: 2844 - protein, 10 aa, Homo Sapiens
  sequence located in KRT9 at 580-589 and may interact with Sequence 2843 in this patent.
GSGGSHGGGS

SEQ ID NO: 2845 - protein, 10 aa, Homo Sapiens
  sequence located in GUCY2D OR GUC2D OR RETGC1 OR RETGC OR GUC1A4 OR CORD6 at 160-169 and may interact with Sequence 2846 in this patent.
TTAPAVTPAA

SEQ ID NO: 2846 - protein, 10 aa, Homo Sapiens
  sequence located in KRT9 at 566-575 and may interact with Sequence 2845 in this patent.
GSGGGYGGGS

SEQ ID NO: 2847 - protein, 10 aa, Homo Sapiens
  sequence located in GUCY2D OR GUC2D OR RETGC1 OR RETGC OR GUC1A4 OR CORD6 at 160-169 and may interact with Sequence 2848 in this patent.
TTAPAVTPAA

SEQ ID NO: 2848 - protein, 10 aa, Homo Sapiens
  sequence located in KRT9 at 544-553 and may interact with Sequence 2847 in this patent.
GSGGGHSGGS

SEQ ID NO: 2849 - protein, 10 aa, Homo Sapiens
  sequence located in GUCY2D OR GUC2D OR RETGC1 OR RETGC OR GUC1A4 OR CORD6 at 160-169 and may interact with Sequence 2850 in this patent.
TTAPAVTPAA

SEQ ID NO: 2850 - protein, 10 aa, Homo Sapiens
  sequence located in KRT9 at 536-545 and may interact with Sequence 2849 in this patent.
GSGGGHSGGS

SEQ ID NO: 2851 - protein, 10 aa, Homo Sapiens
  sequence located in GUCY2D OR GUC2D OR RETGC1 OR RETGC OR GUC1A4 OR CORD6 at 160-169 and may interact with Sequence 2852 in this patent.
TTAPAVTPAA

SEQ ID NO: 2852 - protein, 10 aa, Homo Sapiens
  sequence located in KRT9 at 528-537 and may interact with Sequence 2851 in this patent.
GSGGGYGGGS

SEQ ID NO: 2853 - protein, 10 aa, Homo Sapiens
  sequence located in GUCY2D OR GUC2D OR RETGC1 OR RETGC OR GUC1A4 OR CORD6 at 160-169 and may interact with Sequence 2854 in this patent.
TTAPAVTPAA

SEQ ID NO: 2854 - protein, 10 aa, Homo Sapiens
  sequence located in KRT9 at 514-523 and may interact with Sequence 2853 in this patent.
GSGGSYGGGS

SEQ ID NO: 2855 - protein, 10 aa, Homo Sapiens
  sequence located in GUCY2D OR GUC2D OR RETGC1 OR RETGC OR GUC1A4 OR CORD6 at 160-169 and may interact with Sequence 2856 in this patent.
TTAPAVTPAA

SEQ ID NO: 2856 - protein, 10 aa, Homo Sapiens
  sequence located in KRT9 at 500-509 and may interact with Sequence 2855 in this patent.
GSGGGYGGGS

SEQ ID NO: 2857 - protein, 10 aa, Homo Sapiens
  sequence located in GUCY2D OR GUC2D OR RETGC1 OR RETGC OR GUC1A4 OR CORD6 at 160-169 and may interact with Sequence 2858 in this patent.
TTAPAVTPAA

SEQ ID NO: 2858 - protein, 10 aa, Homo Sapiens
  sequence located in KRT9 at 479-488 and may interact with Sequence 2857 in this patent.
GSGGSYGRGS

SEQ ID NO: 2859 - protein, 10 aa, Homo Sapiens
  sequence located in GUCY2D OR GUC2D OR RETGC1 OR RETGC OR GUC1A4 OR CORD6 at 159-168 and may interact with Sequence 2860 in this patent.
GTTAPAVTPA

SEQ ID NO: 2860 - protein, 10 aa, Homo Sapiens
  sequence located in KRT9 at 606-615 and may interact with Sequence 2859 in this patent.
SGSGGGYGGG

SEQ ID NO: 2861 - protein, 10 aa, Homo Sapiens
  sequence located in GUCY2D OR GUC2D OR RETGC1 OR RETGC OR GUC1A4 OR CORD6 at 159-168 and may interact with Sequence 2862 in this patent.
GTTAPAVTPA

SEQ ID NO: 2862 - protein, 10 aa, Homo Sapiens
  sequence located in KRT10 at 563-572 and may interact with Sequence 2861 in this patent.
GGGYGGGSSS

SEQ ID NO: 2863 - protein, 10 aa, Homo Sapiens
  sequence located in GUCY2D OR GUC2D OR RETGC1 OR RETGC OR GUC1A4 OR CORD6 at 159-168 and may interact with Sequence 2864 in this patent.
GTTAPAVTPA

SEQ ID NO: 2864 - protein, 10 aa, Homo Sapiens
  sequence located in KRT10 at 519-528 and may interact with Sequence 2863 in this patent.
SGGHGGGSSS

SEQ ID NO: 2865 - protein, 10 aa, Homo Sapiens
  sequence located in GUCY2D OR GUC2D OR RETGC1 OR RETGC OR GUC1A4 OR CORD6 at 159-168 and may interact with Sequence 2866 in this patent.
GTTAPAVTPA

SEQ ID NO: 2866 - protein, 10 aa, Homo Sapiens
  sequence located in KRT10 at 510-519 and may interact with Sequence 2865 in this patent.
GGGYGGGSSS

SEQ ID NO: 2867 - protein, 10 aa, Homo Sapiens
  sequence located in GUCY2D OR GUC2D OR RETGC1 OR RETGC OR GUC1A4 OR CORD6 at 160-169 and may interact with Sequence 2868 in this patent.
TTAPAVTPAA

SEQ ID NO: 2868 - protein, 10 aa, Homo Sapiens
  sequence located in KRT10 at 562-571 and may interact with Sequence 2867 in this patent.
SGGGYGGGSS

SEQ ID NO: 2869 - protein, 10 aa, Homo Sapiens
  sequence located in GUCY2D OR GUC2D OR RETGC1 OR RETGC OR GUC1A4 OR CORD6 at 160-169 and may interact with Sequence 2870 in this patent.
TTAPAVTPAA

SEQ ID NO: 2870 - protein, 10 aa, Homo Sapiens
  sequence located in KRT10 at 535-544 and may interact with Sequence 2869 in this patent.
SSGGYGGGSS

SEQ ID NO: 2871 - protein, 10 aa, Homo Sapiens
  sequence located in GUCY2D OR GUC2D OR RETGC1 OR RETGC OR GUC1A4 OR CORD6 at 160-169 and may interact with Sequence 2872 in this patent.
TTAPAVTPAA

SEQ ID NO: 2872 - protein, 10 aa, Homo Sapiens
  sequence located in KRT10 at 527-536 and may interact with Sequence 2871 in this patent.
SSGGHGGSSS

SEQ ID NO: 2873 - protein, 10 aa, Homo Sapiens
  sequence located in GUCY2D OR GUC2D OR RETGC1 OR RETGC OR GUC1A4 OR CORD6 at 160-169 and may interact with Sequence 2874 in this patent.
TTAPAVTPAA

SEQ ID NO: 2874 - protein, 10 aa, Homo Sapiens
  sequence located in KRT10 at 518-527 and may interact with Sequence 2873 in this patent.
SSGGHGGGSS

SEQ ID NO: 2875 - protein, 10 aa, Homo Sapiens
  sequence located in GUCY2D OR GUC2D OR RETGC1 OR RETGC OR GUC1A4 OR CORD6 at 160-169 and may interact with Sequence 2876 in this patent.
TTAPAVTPAA

SEQ ID NO: 2876 - protein, 10 aa, Homo Sapiens
  sequence located in KRT10 at 509-518 and may interact with Sequence 2875 in this patent.
SGGGYGGGSS

SEQ ID NO: 2877 - protein, 10 aa, Homo Sapiens
  sequence located in GUCY2D OR GUC2D OR RETGC1 OR RETGC OR GUC1A4 OR CORD6 at 160-169 and may interact with Sequence 2878 in this patent.
TTAPAVTPAA

SEQ ID NO: 2878 - protein, 10 aa, Homo Sapiens
  sequence located in KRT10 at 495-504 and may interact with Sequence 2877 in this patent.
SGGGYGGGSS

SEQ ID NO: 2879 - protein, 10 aa, Homo Sapiens
  sequence located in GUCY2D OR GUC2D OR RETGC1 OR RETGC OR GUC1A4 OR CORD6 at 160-169 and may interact with Sequence 2880 in this patent.
TTAPAVTPAA

SEQ ID NO: 2880 - protein, 10 aa, Homo Sapiens
  sequence located in KRT10 at 561-570 and may interact with Sequence 2879 in this patent.
SSGGGYGGGS

SEQ ID NO: 2881 - protein, 10 aa, Homo Sapiens
  sequence located in GUCY2D OR GUC2D OR RETGC1 OR RETGC OR GUC1A4 OR CORD6 at 160-169 and may interact with Sequence 2882 in this patent.
TTAPAVTPAA

SEQ ID NO: 2882 - protein, 10 aa, Homo Sapiens
  sequence located in KRT10 at 534-543 and may interact with Sequence 2881 in this patent.
SSSGGYGGGS

SEQ ID NO: 2883 - protein, 10 aa, Homo Sapiens
  sequence located in GUCY2D OR GUC2D OR RETGC1 OR RETGC OR GUC1A4 OR CORD6 at 160-169 and may interact with Sequence 2884 in this patent.
TTAPAVTPAA

SEQ ID NO: 2884 - protein, 10 aa, Homo Sapiens
  sequence located in KRT10 at 526-535 and may interact with Sequence 2883 in this patent.
SSSGGHGGSS

SEQ ID NO: 2885 - protein, 10 aa, Homo Sapiens
  sequence located in GUCY2D OR GUC2D OR RETGC1 OR RETGC OR GUC1A4 OR CORD6 at 160-169 and may interact with Sequence 2886 in this patent.
TTAPAVTPAA

SEQ ID NO: 2886 - protein, 10 aa, Homo Sapiens
  sequence located in KRT10 at 517-526 and may interact with Sequence 2885 in this patent.
SSSGGHGGGS

SEQ ID NO: 2887 - protein, 10 aa, Homo Sapiens
  sequence located in GUCY2D OR GUC2D OR RETGC1 OR RETGC OR GUC1A4 OR CORD6 at 160-169 and may interact with Sequence 2888 in this patent.
TTAPAVTPAA

SEQ ID NO: 2888 - protein, 10 aa, Homo Sapiens
  sequence located in KRT10 at 508-517 and may interact with Sequence 2887 in this patent.
SSGGGYGGGS

SEQ ID NO: 2889 - protein, 10 aa, Homo Sapiens
  sequence located in GUCY2D OR GUC2D OR RETGC1 OR RETGC OR GUC1A4 OR CORD6 at 160-169 and may interact with Sequence 2890 in this patent.
TTAPAVTPAA

SEQ ID NO: 2890 - protein, 10 aa, Homo Sapiens
  sequence located in KRT10 at 494-503 and may interact with Sequence 2889 in this patent.
SSGGGYGGGS

SEQ ID NO: 2891 - protein, 10 aa, Homo Sapiens
  sequence located in GUCY2D OR GUC2D OR RETGC1 OR RETGC OR GUC1A4 OR CORD6 at 159-168 and may interact with Sequence 2892 in this patent.
GTTAPAVTPA

SEQ ID NO: 2892 - protein, 10 aa, Homo Sapiens
  sequence located in KRT10 at 560-569 and may interact with Sequence 2891 in this patent.
SSSGGGYGGG

SEQ ID NO: 2893 - protein, 10 aa, Homo Sapiens
  sequence located in GUCY2D OR GUC2D OR RETGC1 OR RETGC OR GUC1A4 OR CORD6 at 159-168 and may interact with Sequence 2894 in this patent.
GTTAPAVTPA

SEQ ID NO: 2894 - protein, 10 aa, Homo Sapiens
  sequence located in KRT15 OR KRTB at 54-63 and may interact with Sequence 2893 in this patent.
SGSGGGYGGG

SEQ ID NO: 2895 - protein, 10 aa, Homo Sapiens
  sequence located in GUCY2D OR GUC2D OR RETGC1 OR RETGC OR GUC1A4 OR CORD6 at 160-169 and may interact with Sequence 2896 in this patent.
TTAPAVTPAA

SEQ ID NO: 2896 - protein, 10 aa, Homo Sapiens
  sequence located in KRT1 OR KRTA at 582-591 and may interact with Sequence 2895 in this patent.
SSGGYRGGSG

SEQ ID NO: 2897 - protein, 10 aa, Homo Sapiens
  sequence located in GUCY2D OR GUC2D OR RETGC1 OR RETGC OR GUC1A4 OR CORD6 at 160-169 and may interact with Sequence 2898 in this patent.
TTAPAVTPAA

SEQ ID NO: 2898 - protein, 10 aa, Homo Sapiens
  sequence located in KRT1 OR KRTA at 581-590 and may interact with Sequence 2897 in this patent.
SSSGGYRGGS

SEQ ID NO: 2899 - protein, 10 aa, Homo Sapiens
  sequence located in GUCY2D OR GUC2D OR RETGC1 OR RETGC OR GUC1A4 OR CORD6 at 437-446 and may interact with Sequence 2900 in this patent.
PRGGSAPGPD

SEQ ID NO: 2900 - protein, 10 aa, Homo Sapiens
  sequence located in CSNK2A1 OR CK2A1 at 3-12 and may interact with Sequence 2899 in this patent.
GPAAGSRARV

SEQ ID NO: 2901 - protein, 10 aa, Homo Sapiens
  sequence located in GUCY2D OR GUC2D OR RETGC1 OR RETGC OR GUC1A4 OR CORD6 at 311-320 and may interact with Sequence 2902 in this patent.
LTRHCPSEGS

SEQ ID NO: 2902 - protein, 10 aa, Homo Sapiens
  sequence located in KIF1C at 394-403 and may interact with Sequence 2901 in this patent.
EGSVRGALPA

SEQ ID NO: 2903 - protein, 10 aa, Homo Sapiens
  sequence located in GUCY2D OR GUC2D OR RETGC1 OR RETGC OR GUC1A4 OR CORD6 at 526-535 and may interact with Sequence 2904 in this patent.
GSRSSLGARS

SEQ ID NO: 2904 - protein, 10 aa, Homo Sapiens
  sequence located in MKI67 at 2835-2844 and may interact with Sequence 2903 in this patent.
ATSSKRRPRT

SEQ ID NO: 2905 - protein, 10 aa, Homo Sapiens
  sequence located in GUCY2D OR GUC2D OR RETGC1 OR RETGC OR GUC1A4 OR CORD6 at 86-95 and may interact with Sequence 2906 in this patent.
RDPGLAGGPR

SEQ ID NO: 2906 - protein, 10 aa, Homo Sapiens
  sequence located in MYLK OR MLCK at 557-566 and may interact with Sequence 2905 in this patent.
ARSTCEAGVA

SEQ ID NO: 2907 - protein, 10 aa, Homo Sapiens
  sequence located in GUCY2D OR GUC2D OR RETGC1 OR RETGC OR GUC1A4 OR CORD6 at 976-985 and may interact with Sequence 2908 in this patent.
RIGLHSGPCV

SEQ ID NO: 2908 - protein, 10 aa, Homo Sapiens
  sequence located in MYLK OR MLCK at 1358-1367 and may interact with Sequence 2907 in this patent.
DGGSAVQSYS

SEQ ID NO: 2909 - protein, 10 aa, Homo Sapiens
  sequence located in GUCY2D OR GUC2D OR RETGC1 OR RETGC OR GUC1A4 OR CORD6 at 204-213 and may interact with Sequence 2910 in this patent.
ALRARGLPVA

SEQ ID NO: 2910 - protein, 10 aa, Homo Sapiens
  sequence located in RPS6KA3 OR RSK2 OR ISPK1 at 304-313 and may interact with Sequence 2909 in this patent.
RKSSPAQGNR

SEQ ID NO: 2911 - protein, 10 aa, Homo Sapiens
  sequence located in GUCY2D OR GUC2D OR RETGC1 OR RETGC OR GUC1A4 OR CORD6 at 715-724 and may interact with Sequence 2912 in this patent.
RDPALERRGT

SEQ ID NO: 2912 - protein, 10 aa, Homo Sapiens
  sequence located in Unknown at 50-59 and may interact with Sequence 2911 in this patent.
GATSLQSGVP

SEQ ID NO: 2913 - protein, 10 aa, Homo Sapiens
  sequence located in GUCY2D OR GUC2D OR RETGC1 OR RETGC OR GUC1A4 OR CORD6 at 526-535 and may interact with Sequence 2914 in this patent.
GSRSSLGARS

SEQ ID NO: 2914 - protein, 10 aa, Homo Sapiens
  sequence located in LMN1 OR LMNA at 10-19 and may interact with Sequence 2913 in this patent.
TRSGAQASST

SEQ ID NO: 2915 - protein, 10 aa, Homo Sapiens
  sequence located in GUCY2D OR GUC2D OR RETGC1 OR RETGC OR GUC1A4 OR CORD6 at 601-610 and may interact with Sequence 2916 in this patent.
ARGAEGPAAL

SEQ ID NO: 2916 - protein, 10 aa, Homo Sapiens
  sequence located in LAMA3 at 1148-1157 and may interact with Sequence 2915 in this patent.
RSASFSRGGQ

SEQ ID NO: 2917 - protein, 10 aa, Homo Sapiens
  sequence located in GUCY2D OR GUC2D OR RETGC1 OR RETGC OR GUC1A4 OR CORD6 at 1030-1039 and may interact with Sequence 2918 in this patent.
ALDSGYQVEL

SEQ ID NO: 2918 - protein, 10 aa, Homo Sapiens
  sequence located in GRM3 OR MGLUR3 at 316-325 and may interact with Sequence 2917 in this patent.
SKIAPVLHLE

SEQ ID NO: 2919 - protein, 10 aa, Homo Sapiens
  sequence located in GUCY2D OR GUC2D OR RETGC1 OR RETGC OR GUC1A4 OR CORD6 at 2-11 and may interact with Sequence 2920 in this patent.
TACARRAGGL

SEQ ID NO: 2920 - protein, 10 aa, Homo Sapiens
  sequence located in GRM5 OR MGLUR5 at 851-860 and may interact with Sequence 2919 in this patent.
KSSSAASRSS

SEQ ID NO: 2921 - protein, 10 aa, Homo Sapiens
  sequence located in GUCY2D OR GUC2D OR RETGC1 OR RETGC OR GUC1A4 OR CORD6 at 3-12 and may interact with Sequence 2922 in this patent.
ACARRAGGLP

SEQ ID NO: 2922 - protein, 10 aa, Homo Sapiens
  sequence located in GRM5 OR MGLUR5 at 850-859 and may interact with Sequence 2921 in this patent.
GKSSSAASRS

SEQ ID NO: 2923 - protein, 10 aa, Homo Sapiens
  sequence located in GUCY2D OR GUC2D OR RETGC1 OR RETGC OR GUC1A4 OR CORD6 at 157-166 and may interact with Sequence 2924 in this patent.
AEGTTAPAVT

SEQ ID NO: 2924 - protein, 10 aa, Homo Sapiens
  sequence located in MN1 at 205-214 and may interact with Sequence 2923 in this patent.
GLPSSSGSDS

SEQ ID NO: 2925 - protein, 10 aa, Homo Sapiens
  sequence located in GUCY2D OR GUC2D OR RETGC1 OR RETGC OR GUC1A4 OR CORD6 at 424-433 and may interact with Sequence 2926 in this patent.
RGSFLSAGTR

SEQ ID NO: 2926 - protein, 10 aa, Homo Sapiens
  sequence located in CDC25C at 8-17 and may interact with Sequence 2925 in this patent.
STREEGSSGS

SEQ ID NO: 2927 - protein, 10 aa, Homo Sapiens
  sequence located in GUCY2D OR GUC2D OR RETGC1 OR RETGC OR GUC1A4 OR CORD6 at 423-432 and may interact with Sequence 2928 in this patent.
ARGSFLSAGT

SEQ ID NO: 2928 - protein, 10 aa, Homo Sapiens
  sequence located in CDC25C at 7-16 and may interact with Sequence 2927 in this patent.
SSTREEGSSG

SEQ ID NO: 2929 - protein, 10 aa, Homo Sapiens
  sequence located in GUCY2D OR GUC2D OR RETGC1 OR RETGC OR GUC1A4 OR CORD6 at 158-167 and may interact with Sequence 2930 in this patent.
EGTTAPAVTP

SEQ ID NO: 2930 - protein, 10 aa, Homo Sapiens
  sequence located in CMOAT OR MRP2 OR CMRP at 913-922 and may interact with Sequence 2929 in this patent.
LSRSSRSNGR

SEQ ID NO: 2931 - protein, 10 aa, Homo Sapiens
  sequence located in GUCY2D OR GUC2D OR RETGC1 OR RETGC OR GUC1A4 OR CORD6 at 102-111 and may interact with Sequence 2932 in this patent.
PEPCRTPGSL

SEQ ID NO: 2932 - protein, 10 aa, Homo Sapiens
  sequence located in MSH4 at 343-352 and may interact with Sequence 2931 in this patent.
KTPGGSRRLR

SEQ ID NO: 2933 - protein, 10 aa, Homo Sapiens
  sequence located in GUCY2D OR GUC2D OR RETGC1 OR RETGC OR GUC1A4 OR CORD6 at 103-112 and may interact with Sequence 2934 in this patent.
EPCRTPGSLG

SEQ ID NO: 2934 - protein, 10 aa, Homo Sapiens
  sequence located in MSH4 at 342-351 and may interact with Sequence 2933 in this patent.
TKTPGGSRRL

SEQ ID NO: 2935 - protein, 10 aa, Homo Sapiens
  sequence located in GUCY2D OR GUC2D OR RETGC1 OR RETGC OR GUC1A4 OR CORD6 at 4-13 and may interact with Sequence 2936 in this patent.
CARRAGGLPD

SEQ ID NO: 2936 - protein, 10 aa, Homo Sapiens
  sequence located in NDUFA6 OR NADHB14 at 5-14 and may interact with Sequence 2935 in this patent.
VRQATSTAST

SEQ ID NO: 2937 - protein, 10 aa, Homo Sapiens
  sequence located in GUCY2D OR GUC2D OR RETGC1 OR RETGC OR GUC1A4 OR CORD6 at 5-14 and may interact with Sequence 2938 in this patent.
ARRAGGLPDP

SEQ ID NO: 2938 - protein, 10 aa, Homo Sapiens
  sequence located in NDUFA6 OR NADHB14 at 4-13 and may interact with Sequence 2937 in this patent.
GVRQATSTAS

SEQ ID NO: 2939 - protein, 10 aa, Homo Sapiens
  sequence located in GUCY2D OR GUC2D OR RETGC1 OR RETGC OR GUC1A4 OR CORD6 at 6-15 and may interact with Sequence 2940 in this patent.
RRAGGLPDPG

SEQ ID NO: 2940 - protein, 10 aa, Homo Sapiens
  sequence located in NDUFA6 OR NADHB14 at 3-12 and may interact with Sequence 2939 in this patent.
SGVRQATSTA

SEQ ID NO: 2941 - protein, 10 aa, Homo Sapiens
  sequence located in GUCY2D OR GUC2D OR RETGC1 OR RETGC OR GUC1A4 OR CORD6 at 159-168 and may interact with Sequence 2942 in this patent.
GTTAPAVTPA

SEQ ID NO: 2942 - protein, 10 aa, Homo Sapiens
  sequence located in SLC12A2 OR NKCC1 at 750-759 and may interact with Sequence 2941 in this patent.
SSRSRSYSRS

SEQ ID NO: 2943 - protein, 10 aa, Homo Sapiens
  sequence located in GUCY2D OR GUC2D OR RETGC1 OR RETGC OR GUC1A4 OR CORD6 at 51-60 and may interact with Sequence 2944 in this patent.
SAVFTVGVLG

SEQ ID NO: 2944 - protein, 10 aa, Homo Sapiens
  sequence located in NMA at 139-148 and may interact with Sequence 2943 in this patent.
SEDSDGENGT

SEQ ID NO: 2945 - protein, 10 aa, Homo Sapiens
  sequence located in GUCY2D OR GUC2D OR RETGC1 OR RETGC OR GUC1A4 OR CORD6 at 52-61 and may interact with Sequence 2946 in this patent.
AVFTVGVLGP

SEQ ID NO: 2946 - protein, 10 aa, Homo Sapiens
  sequence located in NMA at 138-147 and may interact with Sequence 2945 in this patent.
WSEDSDGENG

SEQ ID NO: 2947 - protein, 10 aa, Homo Sapiens
  sequence located in GUCY2D OR GUC2D OR RETGC1 OR RETGC OR GUC1A4 OR CORD6 at 1-10 and may interact with Sequence 2948 in this patent.
MTACARRAGG

SEQ ID NO: 2948 - protein, 10 aa, Homo Sapiens
  sequence located in NPAS2 at 407-416 and may interact with Sequence 2947 in this patent.
SPSASSRSSH

SEQ ID NO: 2949 - protein, 10 aa, Homo Sapiens
  sequence located in GUCY2D OR GUC2D OR RETGC1 OR RETGC OR GUC1A4 OR CORD6 at 155-164 and may interact with Sequence 2950 in this patent.
TQAEGTTAPA

SEQ ID NO: 2950 - protein, 10 aa, Homo Sapiens
  sequence located in NTAK at 762-771 and may interact with Sequence 2949 in this patent.
SLSLSSGSGG

SEQ ID NO: 2951 - protein, 10 aa, Homo Sapiens
  sequence located in GUCY2D OR GUC2D OR RETGC1 OR RETGC OR GUC1A4 OR CORD6 at 15-24 and may interact with Sequence 2952 in this patent.
GLCGPAWWAP

SEQ ID NO: 2952 - protein, 10 aa, Homo Sapiens
  sequence located in NOTCH1 OR TAN1 at 128-137 and may interact with Sequence 2951 in this patent.
RCPPGWSGKS

SEQ ID NO: 2953 - protein, 10 aa, Homo Sapiens
  sequence located in GUCY2D OR GUC2D OR RETGC1 OR RETGC OR GUC1A4 OR CORD6 at 197-206 and may interact with Sequence 2954 in this patent.
AGRSLSTALR

SEQ ID NO: 2954 - protein, 10 aa, Homo Sapiens
  sequence located in P4HA at 732-741 and may interact with Sequence 2953 in this patent.
RSPAKRGRKS

SEQ ID NO: 2955 - protein, 10 aa, Homo Sapiens
  sequence located in GUCY2D OR GUC2D OR RETGC1 OR RETGC OR GUC1A4 OR CORD6 at 360-369 and may interact with Sequence 2956 in this patent.
GVAEARAAAG

SEQ ID NO: 2956 - protein, 10 aa, Homo Sapiens
  sequence located in PXR1 OR PEX5 at 252-261 and may interact with Sequence 2955 in this patent.
SDRLGPGSGP

SEQ ID NO: 2957 - protein, 10 aa, Homo Sapiens
  sequence located in GUCY2D OR GUC2D OR RETGC1 OR RETGC OR GUC1A4 OR CORD6 at 520-529 and may interact with Sequence 2958 in this patent.
SRKVAQGSRS

SEQ ID NO: 2958 - protein, 10 aa, Homo Sapiens
  sequence located in PEX10 at 31-40 and may interact with Sequence 2957 in this patent.
GALHSLAGAR

SEQ ID NO: 2959 - protein, 10 aa, Homo Sapiens
  sequence located in GUCY2D OR GUC2D OR RETGC1 OR RETGC OR GUC1A4 OR CORD6 at 519-528 and may interact with Sequence 2960 in this patent.
TSRKVAQGSR

SEQ ID NO: 2960 - protein, 10 aa, Homo Sapiens
  sequence located in PEX10 at 30-39 and may interact with Sequence 2959 in this patent.
GGALHSLAGA

SEQ ID NO: 2961 - protein, 10 aa, Homo Sapiens
  sequence located in GUCY2D OR GUC2D OR RETGC1 OR RETGC OR GUC1A4 OR CORD6 at 518-527 and may interact with Sequence 2962 in this patent.
GTSRKVAQGS

SEQ ID NO: 2962 - protein, 10 aa, Homo Sapiens
  sequence located in PEX10 at 29-38 and may interact with Sequence 2961 in this patent.
AGGALHSLAG

SEQ ID NO: 2963 - protein, 10 aa, Homo Sapiens
  sequence located in GUCY2D OR GUC2D OR RETGC1 OR RETGC OR GUC1A4 OR CORD6 at 517-526 and may interact with Sequence 2964 in this patent.
GGTSRKVAQG

SEQ ID NO: 2964 - protein, 10 aa, Homo Sapiens
  sequence located in PEX10 at 28-37 and may interact with Sequence 2963 in this patent.
AAGGALHSLA

SEQ ID NO: 2965 - protein, 10 aa, Homo Sapiens
  sequence located in GUCY2D OR GUC2D OR RETGC1 OR RETGC OR GUC1A4 OR CORD6 at 306-315 and may interact with Sequence 2966 in this patent.
DAVLTLTRHC

SEQ ID NO: 2966 - protein, 10 aa, Homo Sapiens
  sequence located in PLN at 92-101 and may interact with Sequence 2965 in this patent.
GVTGKGQDGI

SEQ ID NO: 2967 - protein, 10 aa, Homo Sapiens
  sequence located in GUCY2D OR GUC2D OR RETGC1 OR RETGC OR GUC1A4 OR CORD6 at 307-316 and may interact with Sequence 2968 in this patent.
AVLTLTRHCP

SEQ ID NO: 2968 - protein, 10 aa, Homo Sapiens
  sequence located in PLN at 91-100 and may interact with Sequence 2967 in this patent.
GGVTGKGQDG

SEQ ID NO: 2969 - protein, 10 aa, Homo Sapiens
  sequence located in GUCY2D OR GUC2D OR RETGC1 OR RETGC OR GUC1A4 OR CORD6 at 308-317 and may interact with Sequence 2970 in this patent.
VLTLTRHCPS

SEQ ID NO: 2970 - protein, 10 aa, Homo Sapiens
  sequence located in PLN at 90-99 and may interact with Sequence 2969 in this patent.
AGGVTGKGQD

SEQ ID NO: 2971 - protein, 10 aa, Homo Sapiens
  sequence located in GUCY2D OR GUC2D OR RETGC1 OR RETGC OR GUC1A4 OR CORD6 at 197-206 and may interact with Sequence 2972 in this patent.
AGRSLSTALR

SEQ ID NO: 2972 - protein, 10 aa, Homo Sapiens
  sequence located in PRB1 at 262-271 and may interact with Sequence 2971 in this patent.
GPPAQGGSKS

SEQ ID NO: 2973 - protein, 10 aa, Homo Sapiens
  sequence located in GUCY2D OR GUC2D OR RETGC1 OR RETGC OR GUC1A4 OR CORD6 at 3-12 and may interact with Sequence 2974 in this patent.
ACARRAGGLP

SEQ ID NO: 2974 - protein, 10 aa, Homo Sapiens
  sequence located in PRB4 at 233-242 and may interact with Sequence 2973 in this patent.
GGRPPRPAQG

SEQ ID NO: 2975 - protein, 10 aa, Homo Sapiens
  sequence located in GUCY2D OR GUC2D OR RETGC1 OR RETGC OR GUC1A4 OR CORD6 at 3-12 and may interact with Sequence 2976 in this patent.
ACARRAGGLP

SEQ ID NO: 2976 - protein, 10 aa, Homo Sapiens
  sequence located in Unknown at 220-229 and may interact with Sequence 2975 in this patent.
GGRPPRPAQG

SEQ ID NO: 2977 - protein, 10 aa, Homo Sapiens
  sequence located in GUCY2D OR GUC2D OR RETGC1 OR RETGC OR GUC1A4 OR CORD6 at 294-303 and may interact with Sequence 2978 in this patent.
ALANSSQLRR

SEQ ID NO: 2978 - protein, 10 aa, Homo Sapiens
  sequence located in ADSL at 137-146 and may interact with Sequence 2977 in this patent.
PAQLTTVGKR

SEQ ID NO: 2979 - protein, 10 aa, Homo Sapiens
  sequence located in GUCY2D OR GUC2D OR RETGC1 OR RETGC OR GUC1A4 OR CORD6 at 356-365 and may interact with Sequence 2980 in this patent.
LLARGVAEAR

SEQ ID NO: 2980 - protein, 10 aa, Homo Sapiens
  sequence located in RBL2 OR RB2 at 377-386 and may interact with Sequence 2979 in this patent.
TGLRNAPSEK

SEQ ID NO: 2981 - protein, 10 aa, Homo Sapiens
  sequence located in GUCY2D OR GUC2D OR RETGC1 OR RETGC OR GUC1A4 OR CORD6 at 313-322 and may interact with Sequence 2982 in this patent.
RHCPSEGSVL

SEQ ID NO: 2982 - protein, 10 aa, Homo Sapiens
  sequence located in RHAG at 273-282 and may interact with Sequence 2981 in this patent.
QNATLAGGVA

SEQ ID NO: 2983 - protein, 10 aa, Homo Sapiens
  sequence located in GUCY2D OR GUC2D OR RETGC1 OR RETGC OR GUC1A4 OR CORD6 at 314-323 and may interact with Sequence 2984 in this patent.
HCPSEGSVLD

SEQ ID NO: 2984 - protein, 10 aa, Homo Sapiens
  sequence located in RHAG at 272-281 and may interact with Sequence 2983 in this patent.
IQNATLAGGV

SEQ ID NO: 2985 - protein, 10 aa, Homo Sapiens
  sequence located in GUCY2D OR GUC2D OR RETGC1 OR RETGC OR GUC1A4 OR CORD6 at 160-169 and may interact with Sequence 2986 in this patent.
TTAPAVTPAA

SEQ ID NO: 2986 - protein, 10 aa, Homo Sapiens
  sequence located in Unknown at 701-710 and may interact with Sequence 2985 in this patent.
RGGGHRGRGG

SEQ ID NO: 2987 - protein, 10 aa, Homo Sapiens
  sequence located in GUCY2D OR GUC2D OR RETGC1 OR RETGC OR GUC1A4 OR CORD6 at 440-449 and may interact with Sequence 2988 in this patent.
GSAPGPDPSC

SEQ ID NO: 2988 - protein, 10 aa, Homo Sapiens
  sequence located in SNRPB OR SNRPB1 OR COD at 100-109 and may interact with Sequence 2987 in this patent.
AAGGPGIGRA

SEQ ID NO: 2989 - protein, 10 aa, Homo Sapiens
  sequence located in GUCY2D OR GUC2D OR RETGC1 OR RETGC OR GUC1A4 OR CORD6 at 160-169 and may interact with Sequence 2990 in this patent.
TTAPAVTPAA

SEQ ID NO: 2990 - protein, 10 aa, Homo Sapiens
  sequence located in SET at 215-224 and may interact with Sequence 2989 in this patent.
RSRSNSRSRS

SEQ ID NO: 2991 - protein, 10 aa, Homo Sapiens
  sequence located in GUCY2D OR GUC2D OR RETGC1 OR RETGC OR GUC1A4 OR CORD6 at 160-169 and may interact with Sequence 2992 in this patent.
TTAPAVTPAA

SEQ ID NO: 2992 - protein, 10 aa, Homo Sapiens
  sequence located in SET at 214-223 and may interact with Sequence 2991 in this patent.
SRSRSNSRSR

SEQ ID NO: 2993 - protein, 10 aa, Homo Sapiens
  sequence located in GUCY2D OR GUC2D OR RETGC1 OR RETGC OR GUC1A4 OR CORD6 at 29-38 and may interact with Sequence 2994 in this patent.
LPRALPRLPL

SEQ ID NO: 2994 - protein, 10 aa, Homo Sapiens
  sequence located in SFRS3 OR SRP20 OR X16 at 353-362 and may interact with Sequence 2993 in this patent.
KRKSRKRSRE

SEQ ID NO: 2995 - protein, 10 aa, Homo Sapiens
  sequence located in GUCY2D OR GUC2D OR RETGC1 OR RETGC OR GUC1A4 OR CORD6 at 160-169 and may interact with Sequence 2996 in this patent.
TTAPAVTPAA

SEQ ID NO: 2996 - protein, 10 aa, Homo Sapiens
  sequence located in SFRS3 OR SRP20 OR X16 at 187-196 and may interact with Sequence 2995 in this patent.
RSRSHSRSRS

SEQ ID NO: 2997 - protein, 10 aa, Homo Sapiens
  sequence located in GUCY2D OR GUC2D OR RETGC1 OR RETGC OR GUC1A4 OR CORD6 at 160-169 and may interact with Sequence 2998 in this patent.
TTAPAVTPAA

SEQ ID NO: 2998 - protein, 10 aa, Homo Sapiens
  sequence located in SFRS3 OR SRP20 OR X16 at 181-190 and may interact with Sequence 2997 in this patent.
RRRSYSRSRS

SEQ ID NO: 2999 - protein, 10 aa, Homo Sapiens
  sequence located in GUCY2D OR GUC2D OR RETGC1 OR RETGC OR GUC1A4 OR CORD6 at 526-535 and may interact with Sequence 3000 in this patent.
GSRSSLGARS

SEQ ID NO: 3000 - protein, 10 aa, Homo Sapiens
  sequence located in SFRS3 OR SRP20 OR X16 at 333-342 and may interact with Sequence 2999 in this patent.
RSRSKAGSRS

SEQ ID NO: 3001 - protein, 10 aa, Homo Sapiens
  sequence located in GUCY2D OR GUC2D OR RETGC1 OR RETGC OR GUC1A4 OR CORD6 at 160-169 and may interact with Sequence 3002 in this patent.
TTAPAVTPAA

SEQ ID NO: 3002 - protein, 10 aa, Homo Sapiens
  sequence located in SFRS3 OR SRP20 OR X16 at 186-195 and may interact with Sequence 3001 in this patent.
SRSRSHSRSR

SEQ ID NO: 3003 - protein, 10 aa, Homo Sapiens
  sequence located in GUCY2D OR GUC2D OR RETGC1 OR RETGC OR GUC1A4 OR CORD6 at 526-535 and may interact with Sequence 3004 in this patent.
GSRSSLGARS

SEQ ID NO: 3004 - protein, 10 aa, Homo Sapiens
  sequence located in SFRS5 OR SRP40 OR HRS at 227-236 and may interact with Sequence 3003 in this patent.
RSRSKGRSRS

SEQ ID NO: 3005 - protein, 10 aa, Homo Sapiens
  sequence located in GUCY2D OR GUC2D OR RETGC1 OR RETGC OR GUC1A4 OR CORD6 at 436-445 and may interact with Sequence 3006 in this patent.
FPRGGSAPGP

SEQ ID NO: 3006 - protein, 10 aa, Homo Sapiens
  sequence located in SFRS5 OR SRP40 OR HRS at 320-329 and may interact with Sequence 3005 in this patent.
KRATSRSRSR

SEQ ID NO: 3007 - protein, 10 aa, Homo Sapiens
  sequence located in GUCY2D OR GUC2D OR RETGC1 OR RETGC OR GUC1A4 OR CORD6 at 524-533 and may interact with Sequence 3008 in this patent.
AQGSRSSLGA

SEQ ID NO: 3008 - protein, 10 aa, Homo Sapiens
  sequence located in SIM1 at 628-637 and may interact with Sequence 3007 in this patent.
GPEAATGALR

SEQ ID NO: 3009 - protein, 10 aa, Homo Sapiens
  sequence located in GUCY2D OR GUC2D OR RETGC1 OR RETGC OR GUC1A4 OR CORD6 at 437-446 and may interact with Sequence 3010 in this patent.
PRGGSAPGPD

SEQ ID NO: 3010 - protein, 10 aa, Homo Sapiens
  sequence located in GH2 at 911-920 and may interact with Sequence 3009 in this patent.
VRARSRTPSR

SEQ ID NO: 3011 - protein, 10 aa, Homo Sapiens
  sequence located in GUCY2D OR GUC2D OR RETGC1 OR RETGC OR GUC1A4 OR CORD6 at 423-432 and may interact with Sequence 3012 in this patent.
ARGSFLSAGT

SEQ ID NO: 3012 - protein, 10 aa, Homo Sapiens
  sequence located in TEAD2 OR TEF4 at 278-287 and may interact with Sequence 3011 in this patent.
GPSGEEAGAG

SEQ ID NO: 3013 - protein, 10 aa, Homo Sapiens
  sequence located in GUCY2D OR GUC2D OR RETGC1 OR RETGC OR GUC1A4 OR CORD6 at 422-431 and may interact with Sequence 3014 in this patent.
PARGSFLSAG

SEQ ID NO: 3014 - protein, 10 aa, Homo Sapiens
  sequence located in TEAD2 OR TEF4 at 277-286 and may interact with Sequence 3013 in this patent.
WGPSGEEAGA

SEQ ID NO: 3015 - protein, 10 aa, Homo Sapiens
  sequence located in GUCY2D OR GUC2D OR RETGC1 OR RETGC OR GUC1A4 OR CORD6 at 571-580 and may interact with Sequence 3016 in this patent.
IAIRPATKTA

SEQ ID NO: 3016 - protein, 10 aa, Homo Sapiens
  sequence located in RELA OR NFKB3 at 200-209 and may interact with Sequence 3015 in this patent.
NRNSGSCLGG

SEQ ID NO: 3017 - protein, 10 aa, Homo Sapiens
  sequence located in GUCY2D OR GUC2D OR RETGC1 OR RETGC OR GUC1A4 OR CORD6 at 570-579 and may interact with Sequence 3018 in this patent.
HIAIRPATKT

SEQ ID NO: 3018 - protein, 10 aa, Homo Sapiens
  sequence located in RELA OR NFKB3 at 199-208 and may interact with Sequence 3017 in this patent.
VNRNSGSCLG

SEQ ID NO: 3019 - protein, 10 aa, Homo Sapiens
  sequence located in GUCY2D OR GUC2D OR RETGC1 OR RETGC OR GUC1A4 OR CORD6 at 600-609 and may interact with Sequence 3020 in this patent.
LARGAEGPAA

SEQ ID NO: 3020 - protein, 10 aa, Homo Sapiens
  sequence located in TIAM1 at 413-422 and may interact with Sequence 3019 in this patent.
SSGTLSSPGQ

SEQ ID NO: 3021 - protein, 10 aa, Homo Sapiens
  sequence located in GUCY2D OR GUC2D OR RETGC1 OR RETGC OR GUC1A4 OR CORD6 at 601-610 and may interact with Sequence 3022 in this patent.
ARGAEGPAAL

SEQ ID NO: 3022 - protein, 10 aa, Homo Sapiens
  sequence located in TIAM1 at 412-421 and may interact with Sequence 3021 in this patent.
QSSGTLSSPG

SEQ ID NO: 3023 - protein, 10 aa, Homo Sapiens
  sequence located in GUCY2D OR GUC2D OR RETGC1 OR RETGC OR GUC1A4 OR CORD6 at 983-992 and may interact with Sequence 3024 in this patent.
PCVAGVVGLT

SEQ ID NO: 3024 - protein, 10 aa, Homo Sapiens
  sequence located in UFD1L at 248-257 and may interact with Sequence 3023 in this patent.
GEADHSGYAG

SEQ ID NO: 3025 - protein, 10 aa, Homo Sapiens
  sequence located in GUCY2D OR GUC2D OR RETGC1 OR RETGC OR GUC1A4 OR CORD6 at 453-462 and may interact with Sequence 3026 in this patent.
PNNICGGGLE

SEQ ID NO: 3026 - protein, 10 aa, Homo Sapiens
  sequence located in ATP6B2 at 8-17 and may interact with Sequence 3025 in this patent.
GIVNGAAPEL

SEQ ID NO: 3027 - protein, 10 aa, Homo Sapiens
  sequence located in GUCY2D OR GUC2D OR RETGC1 OR RETGC OR GUC1A4 OR CORD6 at 1069-1078 and may interact with Sequence 3028 in this patent.
PPDLQPGSSN

SEQ ID NO: 3028 - protein, 10 aa, Homo Sapiens
  sequence located in VIL1 OR VIL at 13-22 and may interact with Sequence 3027 in this patent.
ITTPGLQIWR

SEQ ID NO: 3029 - protein, 10 aa, Homo Sapiens
  sequence located in GUCY2D OR GUC2D OR RETGC1 OR RETGC OR GUC1A4 OR CORD6 at 364-373 and may interact with Sequence 3030 in this patent.
ARAAAGGRWV

SEQ ID NO: 3030 - protein, 10 aa, Homo Sapiens
  sequence located in XE7 at 633-642 and may interact with Sequence 3029 in this patent.
SPRRRSTSPD

SEQ ID NO: 3031 - protein, 10 aa, Homo Sapiens
  sequence located in GUCY2D OR GUC2D OR RETGC1 OR RETGC OR GUC1A4 OR CORD6 at 406-415 and may interact with Sequence 3032 in this patent.
DTDAAGDRLF

SEQ ID NO: 3032 - protein, 10 aa, Homo Sapiens
  sequence located in XRCC1 at 62-71 and may interact with Sequence 3031 in this patent.
KKAIPSSVRI

SEQ ID NO: 3033 - protein, 10 aa, Homo Sapiens
  sequence located in GUCY2D OR GUC2D OR RETGC1 OR RETGC OR GUC1A4 OR CORD6 at 92-101 and may interact with Sequence 3034 in this patent.
GGPRFEVALL

SEQ ID NO: 3034 - protein, 10 aa, Homo Sapiens
  sequence located in KIAA0081 at 211-220 and may interact with Sequence 3033 in this patent.
KEGDLKSRSS

SEQ ID NO: 3035 - protein, 10 aa, Homo Sapiens
  sequence located in GUCY2D OR GUC2D OR RETGC1 OR RETGC OR GUC1A4 OR CORD6 at 526-535 and may interact with Sequence 3036 in this patent.
GSRSSLGARS

SEQ ID NO: 3036 - protein, 10 aa, Homo Sapiens
  sequence located in KIAA0218 at 206-215 and may interact with Sequence 3035 in this patent.
AATRAKPSAA

SEQ ID NO: 3037 - protein, 10 aa, Homo Sapiens
  sequence located in GUCY2D OR GUC2D OR RETGC1 OR RETGC OR GUC1A4 OR CORD6 at 571-580 and may interact with Sequence 3038 in this patent.
IAIRPATKTA

SEQ ID NO: 3038 - protein, 10 aa, Homo Sapiens
  sequence located in ZNF142 at 285-294 and may interact with Sequence 3037 in this patent.
RGLRSGTYGD

SEQ ID NO: 3039 - protein, 10 aa, Homo Sapiens
  sequence located in GUCY2D OR GUC2D OR RETGC1 OR RETGC OR GUC1A4 OR CORD6 at 98-107 and may interact with Sequence 3040 in this patent.
VALLPEPCRT

SEQ ID NO: 3040 - protein, 10 aa, Homo Sapiens
  sequence located in Unknown at 780-789 and may interact with Sequence 3039 in this patent.
YCKKGFRRPS

SEQ ID NO: 3041 - protein, 10 aa, Homo Sapiens
  sequence located in GUCY2D OR GUC2D OR RETGC1 OR RETGC OR GUC1A4 OR CORD6 at 98-107 and may interact with Sequence 3042 in this patent.
VALLPEPCRT

SEQ ID NO: 3042 - protein, 10 aa, Homo Sapiens
  sequence located in ZFY at 776-785 and may interact with Sequence 3041 in this patent.
YCKKGFRRPS

SEQ ID NO: 3043 - protein, 10 aa, Homo Sapiens
  sequence located in GUCY2D OR GUC2D OR RETGC1 OR RETGC OR GUC1A4 OR CORD6 at 196-205 and may interact with Sequence 3044 in this patent.
EAGRSLSTAL

SEQ ID NO: 3044 - protein, 10 aa, Homo Sapiens
  sequence located in ZNF74 at 136-145 and may interact with Sequence 3043 in this patent.
EGRTKAPARL

SEQ ID NO: 3045 - protein, 10 aa, Homo Sapiens
  sequence located in GUCY2D OR GUC2D OR RETGC1 OR RETGC OR GUC1A4 OR CORD6 at 197-206 and may interact with Sequence 3046 in this patent.
AGRSLSTALR

SEQ ID NO: 3046 - protein, 10 aa, Homo Sapiens
  sequence located in ZNF74 at 135-144 and may interact with Sequence 3045 in this patent.
TEGRTKAPAR

SEQ ID NO: 3047 - protein, 10 aa, Homo Sapiens
  sequence located in GUCY2F OR GUC2F OR RETGC2 at 158-167 and may interact with Sequence 3048 in this patent.
NKISYPTFSR

SEQ ID NO: 3048 - protein, 10 aa, Homo Sapiens
  sequence located in MCF2L at 204-213 and may interact with Sequence 3047 in this patent.
TRESGIRDLI

SEQ ID NO: 3049 - protein, 10 aa, Homo Sapiens
  sequence located in GUCY2F OR GUC2F OR RETGC2 at 204-213 and may interact with Sequence 3050 in this patent.
RVASALRSHG

SEQ ID NO: 3050 - protein, 10 aa, Homo Sapiens
  sequence located in HSD11B2 OR HSD11K at 231-240 and may interact with Sequence 3049 in this patent.
AYGTSKAAVA

SEQ ID NO: 3051 - protein, 10 aa, Homo Sapiens
  sequence located in GUCY2F OR GUC2F OR RETGC2 at 628-637 and may interact with Sequence 3052 in this patent.
RGSLEDILTN

SEQ ID NO: 3052 - protein, 10 aa, Homo Sapiens
  sequence located in POLA at 109-118 and may interact with Sequence 3051 in this patent.
AARKFVDEGI

SEQ ID NO: 3053 - protein, 10 aa, Homo Sapiens
  sequence located in GUCY2F OR GUC2F OR RETGC2 at 717-726 and may interact with Sequence 3054 in this patent.
LLRAPRGSRL

SEQ ID NO: 3054 - protein, 10 aa, Homo Sapiens
  sequence located in POLZ OR REV3 OR REV3L at 1582-1591 and may interact with Sequence 3053 in this patent.
KPRTPRSTKQ

SEQ ID NO: 3055 - protein, 10 aa, Homo Sapiens
  sequence located in GUCY2F OR GUC2F OR RETGC2 at 719-728 and may interact with Sequence 3056 in this patent.
RAPRGSRLGS

SEQ ID NO: 3056 - protein, 10 aa, Homo Sapiens
  sequence located in EGR3 OR PILOT at 116-125 and may interact with Sequence 3055 in this patent.
GPEAAASRSP

SEQ ID NO: 3057 - protein, 10 aa, Homo Sapiens
  sequence located in GUCY2F OR GUC2F OR RETGC2 at 126-135 and may interact with Sequence 3058 in this patent.
PTNPGYCEAA

SEQ ID NO: 3058 - protein, 10 aa, Homo Sapiens
  sequence located in ELA2 at 659-668 and may interact with Sequence 3057 in this patent.
GGLGVPGVGG

SEQ ID NO: 3059 - protein, 10 aa, Homo Sapiens
  sequence located in GUCY2F OR GUC2F OR RETGC2 at 3-12 and may interact with Sequence 3060 in this patent.
LGLGRFSRLV

SEQ ID NO: 3060 - protein, 10 aa, Homo Sapiens
  sequence located in EWSR1 OR EWS at 143-152 and may interact with Sequence 3059 in this patent.
NKPTETSQPQ

SEQ ID NO: 3061 - protein, 10 aa, Homo Sapiens
  sequence located in GUCY2F OR GUC2F OR RETGC2 at 719-728 and may interact with Sequence 3062 in this patent.
RAPRGSRLGS

SEQ ID NO: 3062 - protein, 10 aa, Homo Sapiens
  sequence located in EYA4 at 343-352 and may interact with Sequence 3061 in this patent.
TCRSSGSKSR

SEQ ID NO: 3063 - protein, 10 aa, Homo Sapiens
  sequence located in GUCY2F OR GUC2F OR RETGC2 at 524-533 and may interact with Sequence 3064 in this patent.
RGSRASVSFQ

SEQ ID NO: 3064 - protein, 10 aa, Homo Sapiens
  sequence located in DDIT1 OR GADD45 at 104-113 and may interact with Sequence 3063 in this patent.
LETDAGPAAS

SEQ ID NO: 3065 - protein, 10 aa, Homo Sapiens
  sequence located in GUCY2F OR GUC2F OR RETGC2 at 724-733 and may interact with Sequence 3066 in this patent.
SRLGSFAGDV

SEQ ID NO: 3066 - protein, 10 aa, Homo Sapiens
  sequence located in GALNR2 OR GALR2 at 350-359 and may interact with Sequence 3065 in this patent.
GPEPREGPVH

SEQ ID NO: 3067 - protein, 10 aa, Homo Sapiens
  sequence located in GUCY2F OR GUC2F OR RETGC2 at 974-983 and may interact with Sequence 3068 in this patent.
EVPVRIRIGL

SEQ ID NO: 3068 - protein, 10 aa, Homo Sapiens
  sequence located in CCKBR OR CCKRB at 251-260 and may interact with Sequence 3067 in this patent.
FDGDSDSDSQ

SEQ ID NO: 3069 - protein, 10 aa, Homo Sapiens
  sequence located in GUCY2F OR GUC2F OR RETGC2 at 973-982 and may interact with Sequence 3070 in this patent.
PEVPVRIRIG

SEQ ID NO: 3070 - protein, 10 aa, Homo Sapiens
  sequence located in CCKBR OR CCKRB at 250-259 and may interact with Sequence 3069 in this patent.
RFDGDSDSDS

SEQ ID NO: 3071 - protein, 10 aa, Homo Sapiens
  sequence located in GUCY2F OR GUC2F OR RETGC2 at 520-529 and may interact with Sequence 3072 in this patent.
FGSKRGSRAS

SEQ ID NO: 3072 - protein, 10 aa, Homo Sapiens
  sequence located in GATA2 at 272-281 and may interact with Sequence 3071 in this patent.
GGPASSFTPK

SEQ ID NO: 3073 - protein, 10 aa, Homo Sapiens
  sequence located in GUCY2F OR GUC2F OR RETGC2 at 104-113 and may interact with Sequence 3074 in this patent.
CQTSRALSSF

SEQ ID NO: 3074 - protein, 10 aa, Homo Sapiens
  sequence located in (HSPA1A OR HSPA1) AND HSPA1B at 265-274 and may interact with Sequence 3073 in this patent.
RLRTACERAK

SEQ ID NO: 3075 - protein, 10 aa, Homo Sapiens
  sequence located in GUCY2F OR GUC2F OR RETGC2 at 104-113 and may interact with Sequence 3076 in this patent.
CQTSRALSSF

SEQ ID NO: 3076 - protein, 10 aa, Homo Sapiens
  sequence located in HSPA6 OR HSP70B' at 264-273 and may interact with Sequence 3075 in this patent.
RLRTACERAK

SEQ ID NO: 3077 - protein, 10 aa, Homo Sapiens
  sequence located in GUCY2F OR GUC2F OR RETGC2 at 718-727 and may interact with Sequence 3078 in this patent.
LRAPRGSRLG

SEQ ID NO: 3078 - protein, 10 aa, Homo Sapiens
  sequence located in HOX11L1 at 189-198 and may interact with Sequence 3077 in this patent.
EACRSPASET

SEQ ID NO: 3079 - protein, 10 aa, Homo Sapiens
  sequence located in GUCY2F OR GUC2F OR RETGC2 at 717-726 and may interact with Sequence 3080 in this patent.
LLRAPRGSRL

SEQ ID NO: 3080 - protein, 10 aa, Homo Sapiens
  sequence located in HOX11L1 at 188-197 and may interact with Sequence 3079 in this patent.
QEACRSPASE

SEQ ID NO: 3081 - protein, 10 aa, Homo Sapiens
  sequence located in GUCY2F OR GUC2F OR RETGC2 at 393-402 and may interact with Sequence 3082 in this patent.
LMRTDSNGNG

SEQ ID NO: 3082 - protein, 10 aa, Homo Sapiens
  sequence located in ITGA4 at 766-775 and may interact with Sequence 3081 in this patent.
KHSRVTVAIP

SEQ ID NO: 3083 - protein, 10 aa, Homo Sapiens
  sequence located in GUCY2F OR GUC2F OR RETGC2 at 392-401 and may interact with Sequence 3084 in this patent.
QLMRTDSNGN

SEQ ID NO: 3084 - protein, 10 aa, Homo Sapiens
  sequence located in ITGA4 at 765-774 and may interact with Sequence 3083 in this patent.
LKHSRVTVAI

SEQ ID NO: 3085 - protein, 10 aa, Homo Sapiens
  sequence located in GUCY2F OR GUC2F OR RETGC2 at 544-553 and may interact with Sequence 3086 in this patent.
PRLSFSSGSL

SEQ ID NO: 3086 - protein, 10 aa, Homo Sapiens
  sequence located in KRT6A OR K6A at 345-354 and may interact with Sequence 3085 in this patent.
QRSRAEAESW

SEQ ID NO: 3087 - protein, 10 aa, Homo Sapiens
  sequence located in GUCY2F OR GUC2F OR RETGC2 at 544-553 and may interact with Sequence 3088 in this patent.
PRLSFSSGSL

SEQ ID NO: 3088 - protein, 10 aa, Homo Sapiens
  sequence located in KRT6B OR K6B at 345-354 and may interact with Sequence 3087 in this patent.
QRSRAEAESW

SEQ ID NO: 3089 - protein, 10 aa, Homo Sapiens
  sequence located in GUCY2F OR GUC2F OR RETGC2 at 544-553 and may interact with Sequence 3090 in this patent.
PRLSFSSGSL

SEQ ID NO: 3090 - protein, 10 aa, Homo Sapiens
  sequence located in KRT6F at 345-354 and may interact with Sequence 3089 in this patent.
QRSRAEAESW

SEQ ID NO: 3091 - protein, 10 aa, Homo Sapiens
  sequence located in GUCY2F OR GUC2F OR RETGC2 at 716-725 and may interact with Sequence 3092 in this patent.
ELLRAPRGSR

SEQ ID NO: 3092 - protein, 10 aa, Homo Sapiens
  sequence located in ADAM8 OR MS2 at 717-726 and may interact with Sequence 3091 in this patent.
PAPSRGPQEL

SEQ ID NO: 3093 - protein, 10 aa, Homo Sapiens
  sequence located in GUCY2F OR GUC2F OR RETGC2 at 722-731 and may interact with Sequence 3094 in this patent.
RGSRLGSFAG

SEQ ID NO: 3094 - protein, 10 aa, Homo Sapiens
  sequence located in MYC at 273-282 and may interact with Sequence 3093 in this patent.
PGKRSESGSP

SEQ ID NO: 3095 - protein, 10 aa, Homo Sapiens
  sequence located in GUCY2F OR GUC2F OR RETGC2 at 723-732 and may interact with Sequence 3096 in this patent.
GSRLGSFAGD

SEQ ID NO: 3096 - protein, 10 aa, Homo Sapiens
  sequence located in MYH10 at 743-752 and may interact with Sequence 3095 in this patent.
VACETPKPGT

SEQ ID NO: 3097 - protein, 10 aa, Homo Sapiens
  sequence located in GUCY2F OR GUC2F OR RETGC2 at 106-115 and may interact with Sequence 3098 in this patent.
TSRALSSFIS

SEQ ID NO: 3098 - protein, 10 aa, Homo Sapiens
  sequence located in SLC8A1 OR NCX1 OR CNC at 40-49 and may interact with Sequence 3097 in this patent.
GNETGECTGS

SEQ ID NO: 3099 - protein, 10 aa, Homo Sapiens
  sequence located in GUCY2F OR GUC2F OR RETGC2 at 2-11 and may interact with Sequence 3100 in this patent.
FLGLGRFSRL

SEQ ID NO: 3100 - protein, 10 aa, Homo Sapiens
  sequence located in GAP43 at 198-207 and may interact with Sequence 3099 in this patent.
ETGESSQAEE

SEQ ID NO: 3101 - protein, 10 aa, Homo Sapiens
  sequence located in GUCY2F OR GUC2F OR RETGC2 at 163-172 and may interact with Sequence 3102 in this patent.
PTFSRTLPSP

SEQ ID NO: 3102 - protein, 10 aa, Homo Sapiens
  sequence located in NOF1 at 46-55 and may interact with Sequence 3101 in this patent.
RARKRAAKRR

SEQ ID NO: 3103 - protein, 10 aa, Homo Sapiens
  sequence located in GUCY2F OR GUC2F OR RETGC2 at 713-722 and may interact with Sequence 3104 in this patent.
TAPELLRAPR

SEQ ID NO: 3104 - protein, 10 aa, Homo Sapiens
  sequence located in SLC17A4 OR NPT4 at 45-54 and may interact with Sequence 3103 in this patent.
AGGAEELRSS

SEQ ID NO: 3105 - protein, 10 aa, Homo Sapiens
  sequence located in GUCY2F OR GUC2F OR RETGC2 at 714-723 and may interact with Sequence 3106 in this patent.
APELLRAPRG

SEQ ID NO: 3106 - protein, 10 aa, Homo Sapiens
  sequence located in SLC17A4 OR NPT4 at 44-53 and may interact with Sequence 3105 in this patent.
AAGGAEELRS

SEQ ID NO: 3107 - protein, 10 aa, Homo Sapiens
  sequence located in GUCY2F OR GUC2F OR RETGC2 at 521-530 and may interact with Sequence 3108 in this patent.
GSKRGSRASV

SEQ ID NO: 3108 - protein, 10 aa, Homo Sapiens
  sequence located in NUP62 at 336-345 and may interact with Sequence 3107 in this patent.
NTSTGTAFGT

SEQ ID NO: 3109 - protein, 10 aa, Homo Sapiens
  sequence located in GUCY2F OR GUC2F OR RETGC2 at 522-531 and may interact with Sequence 3110 in this patent.
SKRGSRASVS

SEQ ID NO: 3110 - protein, 10 aa, Homo Sapiens
  sequence located in NUP62 at 335-344 and may interact with Sequence 3109 in this patent.
TNTSTGTAFG

SEQ ID NO: 3111 - protein, 10 aa, Homo Sapiens
  sequence located in GUCY2F OR GUC2F OR RETGC2 at 520-529 and may interact with Sequence 3112 in this patent.
FGSKRGSRAS

SEQ ID NO: 3112 - protein, 10 aa, Homo Sapiens
  sequence located in PAX2 at 220-229 and may interact with Sequence 3111 in this patent.
RRSRTTFTAE

SEQ ID NO: 3113 - protein, 10 aa, Homo Sapiens
  sequence located in GUCY2F OR GUC2F OR RETGC2 at 520-529 and may interact with Sequence 3114 in this patent.
FGSKRGSRAS

SEQ ID NO: 3114 - protein, 10 aa, Homo Sapiens
  sequence located in PAX7 OR HUP1 at 218-227 and may interact with Sequence 3113 in this patent.
RRSRTTFTAE

SEQ ID NO: 3115 - protein, 10 aa, Homo Sapiens
  sequence located in GUCY2F OR GUC2F OR RETGC2 at 943-952 and may interact with Sequence 3116 in this patent.
KRNGSRHAAE

SEQ ID NO: 3116 - protein, 10 aa, Homo Sapiens
  sequence located in PXR1 OR PEX5 at 185-194 and may interact with Sequence 3115 in this patent.
FAVSGTVRRL

SEQ ID NO: 3117 - protein, 10 aa, Homo Sapiens
  sequence located in GUCY2F OR GUC2F OR RETGC2 at 719-728 and may interact with Sequence 3118 in this patent.
RAPRGSRLGS

SEQ ID NO: 3118 - protein, 10 aa, Homo Sapiens
  sequence located in PRB2 at 188-197 and may interact with Sequence 3117 in this patent.
GSKSRSARSP

SEQ ID NO: 3119 - protein, 10 aa, Homo Sapiens
  sequence located in GUCY2F OR GUC2F OR RETGC2 at 719-728 and may interact with Sequence 3120 in this patent.
RAPRGSRLGS

SEQ ID NO: 3120 - protein, 10 aa, Homo Sapiens
  sequence located in PRB2 at 126-135 and may interact with Sequence 3119 in this patent.
GSKSRSSRSP

SEQ ID NO: 3121 - protein, 10 aa, Homo Sapiens
  sequence located in GUCY2F OR GUC2F OR RETGC2 at 939-948 and may interact with Sequence 3122 in this patent.
SGLPKRNGSR

SEQ ID NO: 3122 - protein, 10 aa, Homo Sapiens
  sequence located in RGS12 at 652-661 and may interact with Sequence 3121 in this patent.
RSKRFSITRS

SEQ ID NO: 3123 - protein, 10 aa, Homo Sapiens
  sequence located in GUCY2F OR GUC2F OR RETGC2 at 938-947 and may interact with Sequence 3124 in this patent.
ASGLPKRNGS

SEQ ID NO: 3124 - protein, 10 aa, Homo Sapiens
  sequence located in RGS12 at 651-660 and may interact with Sequence 3123 in this patent.
GRSKRFSITR

SEQ ID NO: 3125 - protein, 10 aa, Homo Sapiens
  sequence located in GUCY2F OR GUC2F OR RETGC2 at 165-174 and may interact with Sequence 3126 in this patent.
FSRTLPSPIR

SEQ ID NO: 3126 - protein, 10 aa, Homo Sapiens
  sequence located in RYK at 4400-4409 and may interact with Sequence 3125 in this patent.
EGASEGAGDA

SEQ ID NO: 3127 - protein, 10 aa, Homo Sapiens
  sequence located in GUCY2F OR GUC2F OR RETGC2 at 164-173 and may interact with Sequence 3128 in this patent.
TFSRTLPSPI

SEQ ID NO: 3128 - protein, 10 aa, Homo Sapiens
  sequence located in RYK at 4399-4408 and may interact with Sequence 3127 in this patent.
GEGASEGAGD

SEQ ID NO: 3129 - protein, 10 aa, Homo Sapiens
  sequence located in GUCY2F OR GUC2F OR RETGC2 at 1019-1028 and may interact with Sequence 3130 in this patent.
PYRIHVSLST

SEQ ID NO: 3130 - protein, 10 aa, Homo Sapiens
  sequence located in SELPLG at 346-355 and may interact with Sequence 3129 in this patent.
SRKGHMYPVR

SEQ ID NO: 3131 - protein, 10 aa, Homo Sapiens
  sequence located in GUCY2F OR GUC2F OR RETGC2 at 870-879 and may interact with Sequence 3132 in this patent.
KKGCTVEPEG

SEQ ID NO: 3132 - protein, 10 aa, Homo Sapiens
  sequence located in SHBG at 176-185 and may interact with Sequence 3131 in this patent.
LFPASNLRLP

SEQ ID NO: 3133 - protein, 10 aa, Homo Sapiens
  sequence located in GUCY2F OR GUC2F OR RETGC2 at 164-173 and may interact with Sequence 3134 in this patent.
TFSRTLPSPI

SEQ ID NO: 3134 - protein, 10 aa, Homo Sapiens
  sequence located in T54 at 50-59 and may interact with Sequence 3133 in this patent.
NRGREGAAEC

SEQ ID NO: 3135 - protein, 10 aa, Homo Sapiens
  sequence located in GUCY2F OR GUC2F OR RETGC2 at 2-11 and may interact with Sequence 3136 in this patent.
FLGLGRFSRL

SEQ ID NO: 3136 - protein, 10 aa, Homo Sapiens
  sequence located in TPT1 at 84-93 and may interact with Sequence 3135 in this patent.
KSGKSAKPKE

SEQ ID NO: 3137 - protein, 10 aa, Homo Sapiens
  sequence located in GUCY2F OR GUC2F OR RETGC2 at 161-170 and may interact with Sequence 3138 in this patent.
SYPTFSRTLP

SEQ ID NO: 3138 - protein, 10 aa, Homo Sapiens
  sequence located in TNNT1 OR TNT at 264-273 and may interact with Sequence 3137 in this patent.
RKGAGKGRVG

SEQ ID NO: 3139 - protein, 10 aa, Homo Sapiens
  sequence located in GUCY2F OR GUC2F OR RETGC2 at 545-554 and may interact with Sequence 3140 in this patent.
RLSFSSGSLT

SEQ ID NO: 3140 - protein, 10 aa, Homo Sapiens
  sequence located in THBS2 OR TSP2 at 476-485 and may interact with Sequence 3139 in this patent.
CKGSGRETKA

SEQ ID NO: 3141 - protein, 10 aa, Homo Sapiens
  sequence located in GUCY2F OR GUC2F OR RETGC2 at 163-172 and may interact with Sequence 3142 in this patent.
PTFSRTLPSP

SEQ ID NO: 3142 - protein, 10 aa, Homo Sapiens
  sequence located in XE7 at 656-665 and may interact with Sequence 3141 in this patent.
RRERSRERRG

SEQ ID NO: 3143 - protein, 10 aa, Homo Sapiens
  sequence located in GUCY2F OR GUC2F OR RETGC2 at 546-555 and may interact with Sequence 3144 in this patent.
LSFSSGSLTP

SEQ ID NO: 3144 - protein, 10 aa, Homo Sapiens
  sequence located in KIAA0112 at 349-358 and may interact with Sequence 3143 in this patent.
GRQGPGGKRK

SEQ ID NO: 3145 - protein, 10 aa, Homo Sapiens
  sequence located in GUCY2F OR GUC2F OR RETGC2 at 547-556 and may interact with Sequence 3146 in this patent.
SFSSGSLTPA

SEQ ID NO: 3146 - protein, 10 aa, Homo Sapiens
  sequence located in KIAA0112 at 348-357 and may interact with Sequence 3145 in this patent.
GGRQGPGGKR

SEQ ID NO: 3147 - protein, 10 aa, Homo Sapiens
  sequence located in GUCY2F OR GUC2F OR RETGC2 at 584-593 and may interact with Sequence 3148 in this patent.
LKSIKSRASD

SEQ ID NO: 3148 - protein, 10 aa, Homo Sapiens
  sequence located in KIAA0141 at 487-496 and may interact with Sequence 3147 in this patent.
QLGDLGTRRI

SEQ ID NO: 3149 - protein, 10 aa, Homo Sapiens
  sequence located in GUCY2F OR GUC2F OR RETGC2 at 326-335 and may interact with Sequence 3150 in this patent.
AFTEAAARGE

SEQ ID NO: 3150 - protein, 10 aa, Homo Sapiens
  sequence located in ZNF124 at 241-250 and may interact with Sequence 3149 in this patent.
GKGFRCSSSL

SEQ ID NO: 3151 - protein, 10 aa, Homo Sapiens
  sequence located in GUCY2F OR GUC2F OR RETGC2 at 714-723 and may interact with Sequence 3152 in this patent.
APELLRAPRG

SEQ ID NO: 3152 - protein, 10 aa, Homo Sapiens
  sequence located in ZNF142 at 148-157 and may interact with Sequence 3151 in this patent.
SRLEQAGRST

SEQ ID NO: 3153 - protein, 10 aa, Homo Sapiens
  sequence located in GUCY2F OR GUC2F OR RETGC2 at 942-951 and may interact with Sequence 3154 in this patent.
PKRNGSRHAA

SEQ ID NO: 3154 - protein, 10 aa, Homo Sapiens
  sequence located in ZFX at 9-18 and may interact with Sequence 3153 in this patent.
RSVSASVALG

SEQ ID NO: 3155 - protein, 10 aa, Homo Sapiens
  sequence located in GUCY2F OR GUC2F OR RETGC2 at 327-336 and may interact with Sequence 3156 in this patent.
FTEAAARGEI

SEQ ID NO: 3156 - protein, 10 aa, Homo Sapiens
  sequence located in ZNF26 OR KOX20 at 8-17 and may interact with Sequence 3155 in this patent.
KGFSRRSALN

SEQ ID NO: 3157 - protein, 10 aa, Homo Sapiens
  sequence located in GUCY2F OR GUC2F OR RETGC2 at 326-335 and may interact with Sequence 3158 in this patent.
AFTEAAARGE

SEQ ID NO: 3158 - protein, 10 aa, Homo Sapiens
  sequence located in ZNF26 OR KOX20 at 7-16 and may interact with Sequence 3157 in this patent.
GKGFSRRSAL

SEQ ID NO: 3159 - protein, 10 aa, Homo Sapiens
  sequence located in GUCY2F OR GUC2F OR RETGC2 at 958-967 and may interact with Sequence 3160 in this patent.
LDILSSVGTF

SEQ ID NO: 3160 - protein, 10 aa, Homo Sapiens
  sequence located in ZNF44 OR KOX7 at 180-189 and may interact with Sequence 3159 in this patent.
QINQRAHAGE

SEQ ID NO: 3161 - protein, 10 aa, Homo Sapiens
  sequence located in CSF2RB OR IL5RB OR IL3RB at 114-123 and may interact with Sequence 3162 in this patent.
GSERCPRCSQ

SEQ ID NO: 3162 - protein, 10 aa, Homo Sapiens
  sequence located in HES1 OR HRY OR HL at 14-23 and may interact with Sequence 3161 in this patent.
AAFAGRATAL

SEQ ID NO: 3163 - protein, 10 aa, Homo Sapiens
  sequence located in CSF2RB OR IL5RB OR IL3RB at 114-123 and may interact with Sequence 3164 in this patent.
GSERCPRCSQ

SEQ ID NO: 3164 - protein, 10 aa, Homo Sapiens
  sequence located in IL5 at 13-22 and may interact with Sequence 3163 in this patent.
LAAPGAALAP

SEQ ID NO: 3165 - protein, 10 aa, Homo Sapiens
  sequence located in CSF2RB OR IL5RB OR IL3RB at 70-79 and may interact with Sequence 3166 in this patent.
YGYGQGAGTL

SEQ ID NO: 3166 - protein, 10 aa, Homo Sapiens
  sequence located in Unknown at 6-15 and may interact with Sequence 3165 in this patent.
QSPSTLSVSV

SEQ ID NO: 3167 - protein, 10 aa, Homo Sapiens
  sequence located in CSF2RB OR IL5RB OR IL3RB at 71-80 and may interact with Sequence 3168 in this patent.
GYGQGAGTLS

SEQ ID NO: 3168 - protein, 10 aa, Homo Sapiens
  sequence located in Unknown at 5-14 and may interact with Sequence 3167 in this patent.
TQSPSTLSVS

SEQ ID NO: 3169 - protein, 10 aa, Homo Sapiens
  sequence located in CSF2RB OR IL5RB OR IL3RB at 70-79 and may interact with Sequence 3170 in this patent.
YGYGQGAGTL

SEQ ID NO: 3170 - protein, 10 aa, Homo Sapiens
  sequence located in Unknown at 6-15 and may interact with Sequence 3169 in this patent.
QSPSSLSVSV

SEQ ID NO: 3171 - protein, 10 aa, Homo Sapiens
  sequence located in CSF2RB OR IL5RB OR IL3RB at 71-80 and may interact with Sequence 3172 in this patent.
GYGQGAGTLS

SEQ ID NO: 3172 - protein, 10 aa, Homo Sapiens
  sequence located in Unknown at 5-14 and may interact with Sequence 3171 in this patent.
TQSPSSLSVS

SEQ ID NO: 3173 - protein, 10 aa, Homo Sapiens
  sequence located in CSF2RB OR IL5RB OR IL3RB at 155-164 and may interact with Sequence 3174 in this patent.
TTLADKDGEI

SEQ ID NO: 3174 - protein, 10 aa, Homo Sapiens
  sequence located in NDUFA2 at 49-58 and may interact with Sequence 3173 in this patent.
DLPILIRECS

SEQ ID NO: 3175 - protein, 10 aa, Homo Sapiens
  sequence located in CSF2RB OR IL5RB OR IL3RB at 113-122 and may interact with Sequence 3176 in this patent.
GGSERCPRCS

SEQ ID NO: 3176 - protein, 10 aa, Homo Sapiens
  sequence located in NUP62 at 31-40 and may interact with Sequence 3175 in this patent.
TTSGGAFGTS

SEQ ID NO: 3177 - protein, 10 aa, Homo Sapiens
  sequence located in CSF2RB OR IL5RB OR IL3RB at 55-64 and may interact with Sequence 3178 in this patent.
IYCKSCYGKK

SEQ ID NO: 3178 - protein, 10 aa, Homo Sapiens
  sequence located in GART OR PRGS at 420-429 and may interact with Sequence 3177 in this patent.
DVGFRAIAFL

SEQ ID NO: 3179 - protein, 10 aa, Homo Sapiens
  sequence located in CSF2RB OR IL5RB OR IL3RB at 120-129 and may interact with Sequence 3180 in this patent.
RCSQAVYAAE

SEQ ID NO: 3180 - protein, 10 aa, Homo Sapiens
  sequence located in RYK at 3168-3177 and may interact with Sequence 3179 in this patent.
LCSIYSLGTT

SEQ ID NO: 3181 - protein, 10 aa, Homo Sapiens
  sequence located in CSF2RB OR IL5RB OR IL3RB at 115-124 and may interact with Sequence 3182 in this patent.
SERCPRCSQA

SEQ ID NO: 3182 - protein, 10 aa, Homo Sapiens
  sequence located in GH2 at 1009-1018 and may interact with Sequence 3181 in this patent.
RLRRSRTPLR

SEQ ID NO: 3183 - protein, 10 aa, Homo Sapiens
  sequence located in CSF2RB OR IL5RB OR IL3RB at 141-150 and may interact with Sequence 3184 in this patent.
ACFRCAKCGK

SEQ ID NO: 3184 - protein, 10 aa, Homo Sapiens
  sequence located in CCT2 OR CCTB OR 99D8.1 at 20-29 and may interact with Sequence 3183 in this patent.
RAETARLTSF

SEQ ID NO: 3185 - protein, 10 aa, Homo Sapiens
  sequence located in CSF2RB OR IL5RB OR IL3RB at 133-142 and may interact with Sequence 3186 in this patent.
GAGKSWHKAC

SEQ ID NO: 3186 - protein, 10 aa, Homo Sapiens
  sequence located in Unknown at 8-17 and may interact with Sequence 3185 in this patent.
SGPFAPVLSA

SEQ ID NO: 3187 - protein, 10 aa, Homo Sapiens
  sequence located in CSF2RB OR IL5RB OR IL3RB at 75-84 and may interact with Sequence 3188 in this patent.
GAGTLSTDKG

SEQ ID NO: 3188 - protein, 10 aa, Homo Sapiens
  sequence located in USF2 at 272-281 and may interact with Sequence 3187 in this patent.
TGASKGGILS

SEQ ID NO: 3189 - protein, 10 aa, Homo Sapiens
  sequence located in CSF2RB OR IL5RB OR IL3RB at 113-122 and may interact with Sequence 3190 in this patent.
GGSERCPRCS

SEQ ID NO: 3190 - protein, 10 aa, Homo Sapiens
  sequence located in KIAA0411 at 417-426 and may interact with Sequence 3189 in this patent.
AGPGGALGSP

SEQ ID NO: 3191 - protein, 10 aa, Homo Sapiens
  sequence located in DAF OR CD55 at 196-205 and may interact with Sequence 3192 in this patent.
LFGSTSSFCL

SEQ ID NO: 3192 - protein, 10 aa, Homo Sapiens
  sequence located in DDX16 OR DBP2 at 77-86 and may interact with Sequence 3191 in this patent.
EKPARAAERE

SEQ ID NO: 3193 - protein, 10 aa, Homo Sapiens
  sequence located in DAF OR CD55 at 348-357 and may interact with Sequence 3194 in this patent.
GSGTTSGTTR

SEQ ID NO: 3194 - protein, 10 aa, Homo Sapiens
  sequence located in DOC2 at 8-17 and may interact with Sequence 3193 in this patent.
PAPSSTPGSS

SEQ ID NO: 3195 - protein, 10 aa, Homo Sapiens
  sequence located in DAF OR CD55 at 316-325 and may interact with Sequence 3196 in this patent.
TTTKTTTPNA

SEQ ID NO: 3196 - protein, 10 aa, Homo Sapiens
  sequence located in ERBB3 OR HER3 at 523-532 and may interact with Sequence 3195 in this patent.
CRRFSRGRIC

SEQ ID NO: 3197 - protein, 10 aa, Homo Sapiens
  sequence located in DAF OR CD55 at 348-357 and may interact with Sequence 3198 in this patent.
GSGTTSGTTR

SEQ ID NO: 3198 - protein, 10 aa, Homo Sapiens
  sequence located in FXR1 at 395-404 and may interact with Sequence 3197 in this patent.
PGSGRGSGGS

SEQ ID NO: 3199 - protein, 10 aa, Homo Sapiens
  sequence located in DAF OR CD55 at 348-357 and may interact with Sequence 3200 in this patent.
GSGTTSGTTR

SEQ ID NO: 3200 - protein, 10 aa, Homo Sapiens
  sequence located in GATA2 at 194-203 and may interact with Sequence 3199 in this patent.
ASSSAGGSAA

SEQ ID NO: 3201 - protein, 10 aa, Homo Sapiens
  sequence located in DAF OR CD55 at 305-314 and may interact with Sequence 3202 in this patent.
PTTEVSPTSQ

SEQ ID NO: 3202 - protein, 10 aa, Homo Sapiens
  sequence located in TCF9 at 70-79 and may interact with Sequence 3201 in this patent.
LGRRGNFRSR

SEQ ID NO: 3203 - protein, 10 aa, Homo Sapiens
  sequence located in DAF OR CD55 at 348-357 and may interact with Sequence 3204 in this patent.
GSGTTSGTTR

SEQ ID NO: 3204 - protein, 10 aa, Homo Sapiens
  sequence located in GPR2 at 61-70 and may interact with Sequence 3203 in this patent.
ARRAARSPTS

SEQ ID NO: 3205 - protein, 10 aa, Homo Sapiens
  sequence located in DAF OR CD55 at 348-357 and may interact with Sequence 3206 in this patent.
GSGTTSGTTR

SEQ ID NO: 3206 - protein, 10 aa, Homo Sapiens
  sequence located in FKHL13 OR HFH4 at 91-100 and may interact with Sequence 3205 in this patent.
PTSSCTSRSA

SEQ ID NO: 3207 - protein, 10 aa, Homo Sapiens
  sequence located in DAF OR CD55 at 193-202 and may interact with Sequence 3208 in this patent.
GYKLFGSTSS

SEQ ID NO: 3208 - protein, 10 aa, Homo Sapiens
  sequence located in HSR1 at 92-101 and may interact with Sequence 3207 in this patent.
SVLKKSRRRG

SEQ ID NO: 3209 - protein, 10 aa, Homo Sapiens
  sequence located in DAF OR CD55 at 192-201 and may interact with Sequence 3210 in this patent.
TGYKLFGSTS

SEQ ID NO: 3210 - protein, 10 aa, Homo Sapiens
  sequence located in HSR1 at 91-100 and may interact with Sequence 3209 in this patent.
SSVLKKSRRR

SEQ ID NO: 3211 - protein, 10 aa, Homo Sapiens
  sequence located in DAF OR CD55 at 348-357 and may interact with Sequence 3212 in this patent.
GSGTTSGTTR

SEQ ID NO: 3212 - protein, 10 aa, Homo Sapiens
  sequence located in HOXA9 OR HOX1G at 369-378 and may interact with Sequence 3211 in this patent.
AGARRATRRA

SEQ ID NO: 3213 - protein, 10 aa, Homo Sapiens
  sequence located in DAF OR CD55 at 328-337 and may interact with Sequence 3214 in this patent.
TRSTPVSRTT

SEQ ID NO: 3214 - protein, 10 aa, Homo Sapiens
  sequence located in EIF4H OR WBSCR1 OR WSCR1 at 23-32 and may interact with Sequence 3213 in this patent.
GSAGGHGSRS

SEQ ID NO: 3215 - protein, 10 aa, Homo Sapiens
  sequence located in DAF OR CD55 at 327-336 and may interact with Sequence 3216 in this patent.
ATRSTPVSRT

SEQ ID NO: 3216 - protein, 10 aa, Homo Sapiens
  sequence located in EIF4H OR WBSCR1 OR WSCR1 at 22-31 and may interact with Sequence 3215 in this patent.
RGSAGGHGSR

SEQ ID NO: 3217 - protein, 10 aa, Homo Sapiens
  sequence located in DAF OR CD55 at 278-287 and may interact with Sequence 3218 in this patent.
GPPPECRGKS

SEQ ID NO: 3218 - protein, 10 aa, Homo Sapiens
  sequence located in ITGAM OR CR3A OR CD11B at 516-525 and may interact with Sequence 3217 in this patent.
PWGRFGAALT

SEQ ID NO: 3219 - protein, 10 aa, Homo Sapiens
  sequence located in DAF OR CD55 at 327-336 and may interact with Sequence 3220 in this patent.
ATRSTPVSRT

SEQ ID NO: 3220 - protein, 10 aa, Homo Sapiens
  sequence located in KRT9 at 49-58 and may interact with Sequence 3219 in this patent.
SSGYGGGSSR

SEQ ID NO: 3221 - protein, 10 aa, Homo Sapiens
  sequence located in DAF OR CD55 at 328-337 and may interact with Sequence 3222 in this patent.
TRSTPVSRTT

SEQ ID NO: 3222 - protein, 10 aa, Homo Sapiens
  sequence located in KRT9 at 48-57 and may interact with Sequence 3221 in this patent.
SSSGYGGGSS

SEQ ID NO: 3223 - protein, 10 aa, Homo Sapiens
  sequence located in DAF OR CD55 at 351-360 and may interact with Sequence 3224 in this patent.
TTSGTTRLLS

SEQ ID NO: 3224 - protein, 10 aa, Homo Sapiens
  sequence located in KRT9 at 602-611 and may interact with Sequence 3223 in this patent.
GEEASGSGGG

SEQ ID NO: 3225 - protein, 10 aa, Homo Sapiens
  sequence located in DAF OR CD55 at 348-357 and may interact with Sequence 3226 in this patent.
GSGTTSGTTR

SEQ ID NO: 3226 - protein, 10 aa, Homo Sapiens
  sequence located in KRT9 at 575-584 and may interact with Sequence 3225 in this patent.
SGSRGGSGGS

SEQ ID NO: 3227 - protein, 10 aa, Homo Sapiens
  sequence located in DAF OR CD55 at 348-357 and may interact with Sequence 3228 in this patent.
GSGTTSGTTR

SEQ ID NO: 3228 - protein, 10 aa, Homo Sapiens
  sequence located in KRT9 at 509-518 and may interact with Sequence 3227 in this patent.
SGSRGGSGGS

SEQ ID NO: 3229 - protein, 10 aa, Homo Sapiens
  sequence located in DAF OR CD55 at 328-337 and may interact with Sequence 3230 in this patent.
TRSTPVSRTT

SEQ ID NO: 3230 - protein, 10 aa, Homo Sapiens
  sequence located in KRT1 OR KRTA at 5-14 and may interact with Sequence 3229 in this patent.
SSRSGYRSGG

SEQ ID NO: 3231 - protein, 10 aa, Homo Sapiens
  sequence located in DAF OR CD55 at 247-256 and may interact with Sequence 3232 in this patent.
QSVTYACNKG

SEQ ID NO: 3232 - protein, 10 aa, Homo Sapiens
  sequence located in KIF4 at 245-254 and may interact with Sequence 3231 in this patent.
ALVAGVRNRL

SEQ ID NO: 3233 - protein, 10 aa, Homo Sapiens
  sequence located in DAF OR CD55 at 349-358 and may interact with Sequence 3234 in this patent.
SGTTSGTTRL

SEQ ID NO: 3234 - protein, 10 aa, Homo Sapiens
  sequence located in LMNB2 OR LAMB2 at 124-133 and may interact with Sequence 3233 in this patent.
ASRSRASSSK

SEQ ID NO: 3235 - protein, 10 aa, Homo Sapiens
  sequence located in DAF OR CD55 at 348-357 and may interact with Sequence 3236 in this patent.
GSGTTSGTTR

SEQ ID NO: 3236 - protein, 10 aa, Homo Sapiens
  sequence located in LOR OR LRN at 72-81 and may interact with Sequence 3235 in this patent.
AGGAGGSAGA

SEQ ID NO: 3237 - protein, 10 aa, Homo Sapiens
  sequence located in DAF OR CD55 at 123-132 and may interact with Sequence 3238 in this patent.
TVVEYECRPG

SEQ ID NO: 3238 - protein, 10 aa, Homo Sapiens
  sequence located in Unknown at 96-105 and may interact with Sequence 3237 in this patent.
SDNFVFGTGT

SEQ ID NO: 3239 - protein, 10 aa, Homo Sapiens
  sequence located in DAF OR CD55 at 358-367 and may interact with Sequence 3240 in this patent.
LLSGHTCFTL

SEQ ID NO: 3240 - protein, 10 aa, Homo Sapiens
  sequence located in MKLP1 at 626-635 and may interact with Sequence 3239 in this patent.
ECERRVAAKQ

SEQ ID NO: 3241 - protein, 10 aa, Homo Sapiens
  sequence located in DAF OR CD55 at 325-334 and may interact with Sequence 3242 in this patent.
AQATRSTPVS

SEQ ID NO: 3242 - protein, 10 aa, Homo Sapiens
  sequence located in MN1 at 135-144 and may interact with Sequence 3241 in this patent.
GYGGAAGGLG

SEQ ID NO: 3243 - protein, 10 aa, Homo Sapiens
  sequence located in DAF OR CD55 at 348-357 and may interact with Sequence 3244 in this patent.
GSGTTSGTTR

SEQ ID NO: 3244 - protein, 10 aa, Homo Sapiens
  sequence located in MCAM OR MUC18 at 961-970 and may interact with Sequence 3243 in this patent.
ASGSASGSAS

SEQ ID NO: 3245 - protein, 10 aa, Homo Sapiens
  sequence located in DAF OR CD55 at 348-357 and may interact with Sequence 3246 in this patent.
GSGTTSGTTR

SEQ ID NO: 3246 - protein, 10 aa, Homo Sapiens
  sequence located in MCAM OR MUC18 at 960-969 and may interact with Sequence 3245 in this patent.
SASGSASGSA

SEQ ID NO: 3247 - protein, 10 aa, Homo Sapiens
  sequence located in DAF OR CD55 at 348-357 and may interact with Sequence 3248 in this patent.
GSGTTSGTTR

SEQ ID NO: 3248 - protein, 10 aa, Homo Sapiens
  sequence located in MUC2 OR SMUC at 5163-5172 and may interact with Sequence 3247 in this patent.
TGTSRRARRS

SEQ ID NO: 3249 - protein, 10 aa, Homo Sapiens
  sequence located in DAF OR CD55 at 285-294 and may interact with Sequence 3250 in this patent.
GKSLTSKVPP

SEQ ID NO: 3250 - protein, 10 aa, Homo Sapiens
  sequence located in MYH9 at 791-800 and may interact with Sequence 3249 in this patent.
RGYLARKAFA

SEQ ID NO: 3251 - protein, 10 aa, Homo Sapiens
  sequence located in DAF OR CD55 at 286-295 and may interact with Sequence 3252 in this patent.
KSLTSKVPPT

SEQ ID NO: 3252 - protein, 10 aa, Homo Sapiens
  sequence located in MYH9 at 790-799 and may interact with Sequence 3251 in this patent.
CRGYLARKAF

SEQ ID NO: 3253 - protein, 10 aa, Homo Sapiens
  sequence located in DAF OR CD55 at 330-339 and may interact with Sequence 3254 in this patent.
STPVSRTTKH

SEQ ID NO: 3254 - protein, 10 aa, Homo Sapiens
  sequence located in NAGA at 83-92 and may interact with Sequence 3253 in this patent.
GGRDASGRLM

SEQ ID NO: 3255 - protein, 10 aa, Homo Sapiens
  sequence located in DAF OR CD55 at 351-360 and may interact with Sequence 3256 in this patent.
TTSGTTRLLS

SEQ ID NO: 3256 - protein, 10 aa, Homo Sapiens
  sequence located in OXT OR OT at 88-97 and may interact with Sequence 3255 in this patent.
GQKACGSGGR

SEQ ID NO: 3257 - protein, 10 aa, Homo Sapiens
  sequence located in DAF OR CD55 at 352-361 and may interact with Sequence 3258 in this patent.
TSGTTRLLSG

SEQ ID NO: 3258 - protein, 10 aa, Homo Sapiens
  sequence located in OXT OR OT at 87-96 and may interact with Sequence 3257 in this patent.
SGQKACGSGG

SEQ ID NO: 3259 - protein, 10 aa, Homo Sapiens
  sequence located in DAF OR CD55 at 351-360 and may interact with Sequence 3260 in this patent.
TTSGTTRLLS

SEQ ID NO: 3260 - protein, 10 aa, Homo Sapiens
  sequence located in AVP OR ARVP OR VP at 88-97 and may interact with Sequence 3259 in this patent.
GQKACGSGGR

SEQ ID NO: 3261 - protein, 10 aa, Homo Sapiens
  sequence located in DAF OR CD55 at 352-361 and may interact with Sequence 3262 in this patent.
TSGTTRLLSG

SEQ ID NO: 3262 - protein, 10 aa, Homo Sapiens
  sequence located in AVP OR ARVP OR VP at 87-96 and may interact with Sequence 3261 in this patent.
SGQKACGSGG

SEQ ID NO: 3263 - protein, 10 aa, Homo Sapiens
  sequence located in DAF OR CD55 at 347-356 and may interact with Sequence 3264 in this patent.
KGSGTTSGTT

SEQ ID NO: 3264 - protein, 10 aa, Homo Sapiens
  sequence located in NID2 at 1224-1233 and may interact with Sequence 3263 in this patent.
LATPGSRTCR

SEQ ID NO: 3265 - protein, 10 aa, Homo Sapiens
  sequence located in DAF OR CD55 at 348-357 and may interact with Sequence 3266 in this patent.
GSGTTSGTTR

SEQ ID NO: 3266 - protein, 10 aa, Homo Sapiens
  sequence located in SLC12A2 OR NKCC1 at 744-753 and may interact with Sequence 3265 in this patent.
PRSRSRSSRS

SEQ ID NO: 3267 - protein, 10 aa, Homo Sapiens
  sequence located in DAF OR CD55 at 348-357 and may interact with Sequence 3268 in this patent.
GSGTTSGTTR

SEQ ID NO: 3268 - protein, 10 aa, Homo Sapiens
  sequence located in Unknown at 373-382 and may interact with Sequence 3267 in this patent.
SASGSTAGGT

SEQ ID NO: 3269 - protein, 10 aa, Homo Sapiens
  sequence located in DAF OR CD55 at 348-357 and may interact with Sequence 3270 in this patent.
GSGTTSGTTR

SEQ ID NO: 3270 - protein, 10 aa, Homo Sapiens
  sequence located in NAP1L1 OR NRP at 52-61 and may interact with Sequence 3269 in this patent.
SGSSSGSGSS

SEQ ID NO: 3271 - protein, 10 aa, Homo Sapiens
  sequence located in DAF OR CD55 at 348-357 and may interact with Sequence 3272 in this patent.
GSGTTSGTTR

SEQ ID NO: 3272 - protein, 10 aa, Homo Sapiens
  sequence located in NTAK at 766-775 and may interact with Sequence 3271 in this patent.
SSGSGGGSAS

SEQ ID NO: 3273 - protein, 10 aa, Homo Sapiens
  sequence located in DAF OR CD55 at 348-357 and may interact with Sequence 3274 in this patent.
GSGTTSGTTR

SEQ ID NO: 3274 - protein, 10 aa, Homo Sapiens
  sequence located in NTAK at 727-736 and may interact with Sequence 3273 in this patent.
PRARGASRRT

SEQ ID NO: 3275 - protein, 10 aa, Homo Sapiens
  sequence located in DAF OR CD55 at 151-160 and may interact with Sequence 3276 in this patent.
WSTAVEFCKK

SEQ ID NO: 3276 - protein, 10 aa, Homo Sapiens
  sequence located in RHO at 107-116 and may interact with Sequence 3275 in this patent.
PTGCNLEGFF

SEQ ID NO: 3277 - protein, 10 aa, Homo Sapiens
  sequence located in DAF OR CD55 at 361-370 and may interact with Sequence 3278 in this patent.
GHTCFTLTGL

SEQ ID NO: 3278 - protein, 10 aa, Homo Sapiens
  sequence located in ORC1L OR ORC1 OR PARC1 at 189-198 and may interact with Sequence 3277 in this patent.
PVRAKSKSAE

SEQ ID NO: 3279 - protein, 10 aa, Homo Sapiens
  sequence located in DAF OR CD55 at 348-357 and may interact with Sequence 3280 in this patent.
GSGTTSGTTR

SEQ ID NO: 3280 - protein, 10 aa, Homo Sapiens
  sequence located in P2RY2 OR P2RU1 at 130-139 and may interact with Sequence 3279 in this patent.
ASCTAGSAGT

SEQ ID NO: 3281 - protein, 10 aa, Homo Sapiens
  sequence located in DAF OR CD55 at 201-210 and may interact with Sequence 3282 in this patent.
SSFCLISGSS

SEQ ID NO: 3282 - protein, 10 aa, Homo Sapiens
  sequence located in P4HA at 67-76 and may interact with Sequence 3281 in this patent.
TGERKNGSTA

SEQ ID NO: 3283 - protein, 10 aa, Homo Sapiens
  sequence located in DAF OR CD55 at 291-300 and may interact with Sequence 3284 in this patent.
KVPPTVQKPT

SEQ ID NO: 3284 - protein, 10 aa, Homo Sapiens
  sequence located in RPL13A at 8-17 and may interact with Sequence 3283 in this patent.
LDGRGHLLGR

SEQ ID NO: 3285 - protein, 10 aa, Homo Sapiens
  sequence located in DAF OR CD55 at 346-355 and may interact with Sequence 3286 in this patent.
NKGSGTTSGT

SEQ ID NO: 3286 - protein, 10 aa, Homo Sapiens
  sequence located in RRAD OR RAD at 22-31 and may interact with Sequence 3285 in this patent.
ILAAACSRSG

SEQ ID NO: 3287 - protein, 10 aa, Homo Sapiens
  sequence located in DAF OR CD55 at 348-357 and may interact with Sequence 3288 in this patent.
GSGTTSGTTR

SEQ ID NO: 3288 - protein, 10 aa, Homo Sapiens
  sequence located in RIL at 112-121 and may interact with Sequence 3287 in this patent.
PTTSRRPSGT

SEQ ID NO: 3289 - protein, 10 aa, Homo Sapiens
  sequence located in DAF OR CD55 at 347-356 and may interact with Sequence 3290 in this patent.
KGSGTTSGTT

SEQ ID NO: 3290 - protein, 10 aa, Homo Sapiens
  sequence located in RING3 at 544-553 and may interact with Sequence 3289 in this patent.
SGSGGGSAAL

SEQ ID NO: 3291 - protein, 10 aa, Homo Sapiens
  sequence located in DAF OR CD55 at 348-357 and may interact with Sequence 3292 in this patent.
GSGTTSGTTR

SEQ ID NO: 3292 - protein, 10 aa, Homo Sapiens
  sequence located in RING3 at 543-552 and may interact with Sequence 3291 in this patent.
ASGSGGGSAA

SEQ ID NO: 3293 - protein, 10 aa, Homo Sapiens
  sequence located in DAF OR CD55 at 349-358 and may interact with Sequence 3294 in this patent.
SGTTSGTTRL

SEQ ID NO: 3294 - protein, 10 aa, Homo Sapiens
  sequence located in RING3 at 542-551 and may interact with Sequence 3293 in this patent.
KASGSGGGSA

SEQ ID NO: 3295 - protein, 10 aa, Homo Sapiens
  sequence located in DAF OR CD55 at 350-359 and may interact with Sequence 3296 in this patent.
GTTSGTTRLL

SEQ ID NO: 3296 - protein, 10 aa, Homo Sapiens
  sequence located in RING3 at 541-550 and may interact with Sequence 3295 in this patent.
KKASGSGGGS

SEQ ID NO: 3297 - protein, 10 aa, Homo Sapiens
  sequence located in DAF OR CD55 at 2-11 and may interact with Sequence 3298 in this patent.
TVARPSVPAA

SEQ ID NO: 3298 - protein, 10 aa, Homo Sapiens
  sequence located in SSA2 OR RO60 at 233-242 and may interact with Sequence 3297 in this patent.
GGGYGGSGDG

SEQ ID NO: 3299 - protein, 10 aa, Homo Sapiens
  sequence located in DAF OR CD55 at 347-356 and may interact with Sequence 3300 in this patent.
KGSGTTSGTT

SEQ ID NO: 3300 - protein, 10 aa, Homo Sapiens
  sequence located in SET at 87-96 and may interact with Sequence 3299 in this patent.
FPRSGRGTGR

SEQ ID NO: 3301 - protein, 10 aa, Homo Sapiens
  sequence located in DAF OR CD55 at 348-357 and may interact with Sequence 3302 in this patent.
GSGTTSGTTR

SEQ ID NO: 3302 - protein, 10 aa, Homo Sapiens
  sequence located in SFRS3 OR SRP20 OR X16 at 474-483 and may interact with Sequence 3301 in this patent.
SRSRSASRSP

SEQ ID NO: 3303 - protein, 10 aa, Homo Sapiens
  sequence located in DAF OR CD55 at 348-357 and may interact with Sequence 3304 in this patent.
GSGTTSGTTR

SEQ ID NO: 3304 - protein, 10 aa, Homo Sapiens
  sequence located in SFRS5 OR SRP40 OR HRS at 323-332 and may interact with Sequence 3303 in this patent.
TSRSRSRSRS

SEQ ID NO: 3305 - protein, 10 aa, Homo Sapiens
  sequence located in DAF OR CD55 at 350-359 and may interact with Sequence 3306 in this patent.
GTTSGTTRLL

SEQ ID NO: 3306 - protein, 10 aa, Homo Sapiens
  sequence located in SFRS5 OR SRP40 OR HRS at 274-283 and may interact with Sequence 3305 in this patent.
SRSRSRSPKE

SEQ ID NO: 3307 - protein, 10 aa, Homo Sapiens
  sequence located in DAF OR CD55 at 349-358 and may interact with Sequence 3308 in this patent.
SGTTSGTTRL

SEQ ID NO: 3308 - protein, 10 aa, Homo Sapiens
  sequence located in SFRS5 OR SRP40 OR HRS at 273-282 and may interact with Sequence 3307 in this patent.
RSRSRSRSPK

SEQ ID NO: 3309 - protein, 10 aa, Homo Sapiens
  sequence located in DAF OR CD55 at 348-357 and may interact with Sequence 3310 in this patent.
GSGTTSGTTR

SEQ ID NO: 3310 - protein, 10 aa, Homo Sapiens
  sequence located in SFRS5 OR SRP40 OR HRS at 272-281 and may interact with Sequence 3309 in this patent.
SRSRSRSRSP

SEQ ID NO: 3311 - protein, 10 aa, Homo Sapiens
  sequence located in DAF OR CD55 at 328-337 and may interact with Sequence 3312 in this patent.
TRSTPVSRTT

SEQ ID NO: 3312 - protein, 10 aa, Homo Sapiens
  sequence located in SIX3 at 47-56 and may interact with Sequence 3311 in this patent.
GSGGGNGAGG

SEQ ID NO: 3313 - protein, 10 aa, Homo Sapiens
  sequence located in DAF OR CD55 at 328-337 and may interact with Sequence 3314 in this patent.
TRSTPVSRTT

SEQ ID NO: 3314 - protein, 10 aa, Homo Sapiens
  sequence located in SIX3 at 31-40 and may interact with Sequence 3313 in this patent.
SSGGGNGAGG

SEQ ID NO: 3315 - protein, 10 aa, Homo Sapiens
  sequence located in DAF OR CD55 at 327-336 and may interact with Sequence 3316 in this patent.
ATRSTPVSRT

SEQ ID NO: 3316 - protein, 10 aa, Homo Sapiens
  sequence located in SIX3 at 46-55 and may interact with Sequence 3315 in this patent.
GGSGGGNGAG

SEQ ID NO: 3317 - protein, 10 aa, Homo Sapiens
  sequence located in DAF OR CD55 at 348-357 and may interact with Sequence 3318 in this patent.
GSGTTSGTTR

SEQ ID NO: 3318 - protein, 10 aa, Homo Sapiens
  sequence located in SMOH at 44-53 and may interact with Sequence 3317 in this patent.
AGGSARRSAA

SEQ ID NO: 3319 - protein, 10 aa, Homo Sapiens
  sequence located in DAF OR CD55 at 347-356 and may interact with Sequence 3320 in this patent.
KGSGTTSGTT

SEQ ID NO: 3320 - protein, 10 aa, Homo Sapiens
  sequence located in SMARCA2 OR SNF2L2 OR BRM OR SNF2A at 1262-1271 and may interact with Sequence 3319 in this patent.
CSTGSGSASF

SEQ ID NO: 3321 - protein, 10 aa, Homo Sapiens
  sequence located in DAF OR CD55 at 348-357 and may interact with Sequence 3322 in this patent.
GSGTTSGTTR

SEQ ID NO: 3322 - protein, 10 aa, Homo Sapiens
  sequence located in SPTA1 OR SPTA at 10-19 and may interact with Sequence 3321 in this patent.
SGGSGGCSGA

SEQ ID NO: 3323 - protein, 10 aa, Homo Sapiens
  sequence located in DAF OR CD55 at 103-112 and may interact with Sequence 3324 in this patent.
RLNSASLKQP

SEQ ID NO: 3324 - protein, 10 aa, Homo Sapiens
  sequence located in SPTB2 at 38-47 and may interact with Sequence 3323 in this patent.
RLFERSRIKA

SEQ ID NO: 3325 - protein, 10 aa, Homo Sapiens
  sequence located in DAF OR CD55 at 348-357 and may interact with Sequence 3326 in this patent.
GSGTTSGTTR

SEQ ID NO: 3326 - protein, 10 aa, Homo Sapiens
  sequence located in SREBF2 OR SREBP2 at 57-66 and may interact with Sequence 3325 in this patent.
SGGSGSSSGS

SEQ ID NO: 3327 - protein, 10 aa, Homo Sapiens
  sequence located in DAF OR CD55 at 348-357 and may interact with Sequence 3328 in this patent.
GSGTTSGTTR

SEQ ID NO: 3328 - protein, 10 aa, Homo Sapiens
  sequence located in SREBF2 OR SREBP2 at 60-69 and may interact with Sequence 3327 in this patent.
SGSSSGSSGS

SEQ ID NO: 3329 - protein, 10 aa, Homo Sapiens
  sequence located in DAF OR CD55 at 348-357 and may interact with Sequence 3330 in this patent.
GSGTTSGTTR

SEQ ID NO: 3330 - protein, 10 aa, Homo Sapiens
  sequence located in SOX22 at 127-136 and may interact with Sequence 3329 in this patent.
PGGSGGGSGS

SEQ ID NO: 3331 - protein, 10 aa, Homo Sapiens
  sequence located in DAF OR CD55 at 348-357 and may interact with Sequence 3332 in this patent.
GSGTTSGTTR

SEQ ID NO: 3332 - protein, 10 aa, Homo Sapiens
  sequence located in TCF3 OR E2A OR ITF1 at 94-103 and may interact with Sequence 3331 in this patent.
ASSSAGGSRT

SEQ ID NO: 3333 - protein, 10 aa, Homo Sapiens
  sequence located in DAF OR CD55 at 348-357 and may interact with Sequence 3334 in this patent.
GSGTTSGTTR

SEQ ID NO: 3334 - protein, 10 aa, Homo Sapiens
  sequence located in USF1 OR USF at 128-137 and may interact with Sequence 3333 in this patent.
AGGTTSGSTA

SEQ ID NO: 3335 - protein, 10 aa, Homo Sapiens
  sequence located in DAF OR CD55 at 367-376 and may interact with Sequence 3336 in this patent.
LTGLLGTLVT

SEQ ID NO: 3336 - protein, 10 aa, Homo Sapiens
  sequence located in F8VWF OR VWF at 2467-2476 and may interact with Sequence 3335 in this patent.
QCSQKPCEDS

SEQ ID NO: 3337 - protein, 10 aa, Homo Sapiens
  sequence located in DAF OR CD55 at 348-357 and may interact with Sequence 3338 in this patent.
GSGTTSGTTR

SEQ ID NO: 3338 - protein, 10 aa, Homo Sapiens
  sequence located in XE169 OR SMCX at 1177-1186 and may interact with Sequence 3337 in this patent.
SSSTASSTTS

SEQ ID NO: 3339 - protein, 10 aa, Homo Sapiens
  sequence located in DAF OR CD55 at 348-357 and may interact with Sequence 3340 in this patent.
GSGTTSGTTR

SEQ ID NO: 3340 - protein, 10 aa, Homo Sapiens
  sequence located in KIAA0076 at 320-329 and may interact with Sequence 3339 in this patent.
PRSSARSPGS

SEQ ID NO: 3341 - protein, 10 aa, Homo Sapiens
  sequence located in DAF OR CD55 at 349-358 and may interact with Sequence 3342 in this patent.
SGTTSGTTRL

SEQ ID NO: 3342 - protein, 10 aa, Homo Sapiens
  sequence located in KIAA0084 at 131-140 and may interact with Sequence 3341 in this patent.
ASRSRASSSK

SEQ ID NO: 3343 - protein, 10 aa, Homo Sapiens
  sequence located in DAG1 at 481-490 and may interact with Sequence 3344 in this patent.
RTTTSGVPRG

SEQ ID NO: 3344 - protein, 10 aa, Homo Sapiens
  sequence located in DCC at 213-222 and may interact with Sequence 3343 in this patent.
SARNPASSRT

SEQ ID NO: 3345 - protein, 10 aa, Homo Sapiens
  sequence located in DAG1 at 473-482 and may interact with Sequence 3346 in this patent.
TASPPTRIRT

SEQ ID NO: 3346 - protein, 10 aa, Homo Sapiens
  sequence located in POLE1 OR POLE at 5-14 and may interact with Sequence 3345 in this patent.
SGGRRRADPG

SEQ ID NO: 3347 - protein, 10 aa, Homo Sapiens
  sequence located in DAG1 at 677-686 and may interact with Sequence 3348 in this patent.
LSRRIAEDDG

SEQ ID NO: 3348 - protein, 10 aa, Homo Sapiens
  sequence located in DSG3 at 229-238 and may interact with Sequence 3347 in this patent.
QASSYRLVVS

SEQ ID NO: 3349 - protein, 10 aa, Homo Sapiens
  sequence located in DAG1 at 470-479 and may interact with Sequence 3350 in this patent.
RLETASPPTR

SEQ ID NO: 3350 - protein, 10 aa, Homo Sapiens
  sequence located in E2F5 at 39-48 and may interact with Sequence 3349 in this patent.
PQLGGAGGGS

SEQ ID NO: 3351 - protein, 10 aa, Homo Sapiens
  sequence located in DAG1 at 412-421 and may interact with Sequence 3352 in this patent.
EPTAVATPPT

SEQ ID NO: 3352 - protein, 10 aa, Homo Sapiens
  sequence located in EWSR1 OR EWS at 590-599 and may interact with Sequence 3351 in this patent.
GGRGGDRGGF

SEQ ID NO: 3353 - protein, 10 aa, Homo Sapiens
  sequence located in DAG1 at 412-421 and may interact with Sequence 3354 in this patent.
EPTAVATPPT

SEQ ID NO: 3354 - protein, 10 aa, Homo Sapiens
  sequence located in EWSR1 OR EWS at 488-497 and may interact with Sequence 3353 in this patent.
GGRGGDRGGF

SEQ ID NO: 3355 - protein, 10 aa, Homo Sapiens
  sequence located in DAG1 at 413-422 and may interact with Sequence 3356 in this patent.
PTAVATPPTT

SEQ ID NO: 3356 - protein, 10 aa, Homo Sapiens
  sequence located in EWSR1 OR EWS at 589-598 and may interact with Sequence 3355 in this patent.
RGGRGGDRGG

SEQ ID NO: 3357 - protein, 10 aa, Homo Sapiens
  sequence located in DAG1 at 430-439 and may interact with Sequence 3358 in this patent.
STPKPATPST

SEQ ID NO: 3358 - protein, 10 aa, Homo Sapiens
  sequence located in EWSR1 OR EWS at 607-616 and may interact with Sequence 3357 in this patent.
RGGFGGGRRG

SEQ ID NO: 3359 - protein, 10 aa, Homo Sapiens
  sequence located in DAG1 at 429-438 and may interact with Sequence 3360 in this patent.
VSTPKPATPS

SEQ ID NO: 3360 - protein, 10 aa, Homo Sapiens
  sequence located in EWSR1 OR EWS at 606-615 and may interact with Sequence 3359 in this patent.
DRGGFGGGRR

SEQ ID NO: 3361 - protein, 10 aa, Homo Sapiens
  sequence located in DAG1 at 429-438 and may interact with Sequence 3362 in this patent.
VSTPKPATPS

SEQ ID NO: 3362 - protein, 10 aa, Homo Sapiens
  sequence located in EWSR1 OR EWS at 595-604 and may interact with Sequence 3361 in this patent.
DRGGFRGGRG

SEQ ID NO: 3363 - protein, 10 aa, Homo Sapiens
  sequence located in DAG1 at 341-350 and may interact with Sequence 3364 in this patent.
TPTSPAIAPP

SEQ ID NO: 3364 - protein, 10 aa, Homo Sapiens
  sequence located in EWSR1 OR EWS at 589-598 and may interact with Sequence 3363 in this patent.
RGGRGGDRGG

SEQ ID NO: 3365 - protein, 10 aa, Homo Sapiens
  sequence located in DAG1 at 337-346 and may interact with Sequence 3366 in this patent.
RIVPTPTSPA

SEQ ID NO: 3366 - protein, 10 aa, Homo Sapiens
  sequence located in EWSR1 OR EWS at 297-306 and may interact with Sequence 3365 in this patent.
PDNRGRGRGG

SEQ ID NO: 3367 - protein, 10 aa, Homo Sapiens
  sequence located in DAG1 at 336-345 and may interact with Sequence 3368 in this patent.
SRIVPTPTSP

SEQ ID NO: 3368 - protein, 10 aa, Homo Sapiens
  sequence located in EWSR1 OR EWS at 296-305 and may interact with Sequence 3367 in this patent.
GPDNRGRGRG

SEQ ID NO: 3369 - protein, 10 aa, Homo Sapiens
  sequence located in DAG1 at 481-490 and may interact with Sequence 3370 in this patent.
RTTTSGVPRG

SEQ ID NO: 3370 - protein, 10 aa, Homo Sapiens
  sequence located in EYA3 at 393-402 and may interact with Sequence 3369 in this patent.
SGGSGSHGSS

SEQ ID NO: 3371 - protein, 10 aa, Homo Sapiens
  sequence located in DAG1 at 467-476 and may interact with Sequence 3372 in this patent.
SITRLETASP

SEQ ID NO: 3372 - protein, 10 aa, Homo Sapiens
  sequence located in FABP2 at 73-82 and may interact with Sequence 3371 in this patent.
ADGTELRGTW

SEQ ID NO: 3373 - protein, 10 aa, Homo Sapiens
  sequence located in DAG1 at 340-349 and may interact with Sequence 3374 in this patent.
PTPTSPAIAP

SEQ ID NO: 3374 - protein, 10 aa, Homo Sapiens
  sequence located in FXR1 at 427-436 and may interact with Sequence 3373 in this patent.
GSYGGRGRGR

SEQ ID NO: 3375 - protein, 10 aa, Homo Sapiens
  sequence located in DAG1 at 341-350 and may interact with Sequence 3376 in this patent.
TPTSPAIAPP

SEQ ID NO: 3376 - protein, 10 aa, Homo Sapiens
  sequence located in FXR1 at 426-435 and may interact with Sequence 3375 in this patent.
GGSYGGRGRG

SEQ ID NO: 3377 - protein, 10 aa, Homo Sapiens
  sequence located in DAG1 at 414-423 and may interact with Sequence 3378 in this patent.
TAVATPPTTT

SEQ ID NO: 3378 - protein, 10 aa, Homo Sapiens
  sequence located in FXR1 at 427-436 and may interact with Sequence 3377 in this patent.
GSYGGRGRGR

SEQ ID NO: 3379 - protein, 10 aa, Homo Sapiens
  sequence located in DAG1 at 413-422 and may interact with Sequence 3380 in this patent.
PTAVATPPTT

SEQ ID NO: 3380 - protein, 10 aa, Homo Sapiens
  sequence located in FXR1 at 426-435 and may interact with Sequence 3379 in this patent.
GGSYGGRGRG

SEQ ID NO: 3381 - protein, 10 aa, Homo Sapiens
  sequence located in DAG1 at 706-715 and may interact with Sequence 3382 in this patent.
TVTGSGSCRH

SEQ ID NO: 3382 - protein, 10 aa, Homo Sapiens
  sequence located in GATA1 OR GF1 OR ERYF1 at 337-346 and may interact with Sequence 3381 in this patent.
VAGGSGSGNC

SEQ ID NO: 3383 - protein, 10 aa, Homo Sapiens
  sequence located in DAG1 at 707-716 and may interact with Sequence 3384 in this patent.
VTGSGSCRHL

SEQ ID NO: 3384 - protein, 10 aa, Homo Sapiens
  sequence located in GSN at 571-580 and may interact with Sequence 3383 in this patent.
NSAGATRAVE

SEQ ID NO: 3385 - protein, 10 aa, Homo Sapiens
  sequence located in DAG1 at 707-716 and may interact with Sequence 3386 in this patent.
VTGSGSCRHL

SEQ ID NO: 3386 - protein, 10 aa, Homo Sapiens
  sequence located in GRB7 at 117-126 and may interact with Sequence 3385 in this patent.
EVAAGATARH

SEQ ID NO: 3387 - protein, 10 aa, Homo Sapiens
  sequence located in DAG1 at 483-492 and may interact with Sequence 3388 in this patent.
TTSGVPRGGE

SEQ ID NO: 3388 - protein, 10 aa, Homo Sapiens
  sequence located in HSTF2 OR HSF2 at 313-322 and may interact with Sequence 3387 in this patent.
SSGSDGSSPL

SEQ ID NO: 3389 - protein, 10 aa, Homo Sapiens
  sequence located in DAG1 at 753-762 and may interact with Sequence 3390 in this patent.
TVIPAVVVAA

SEQ ID NO: 3390 - protein, 10 aa, Homo Sapiens
  sequence located in EIF4B at 317-326 and may interact with Sequence 3389 in this patent.
SRDDYRRDDR

SEQ ID NO: 3391 - protein, 10 aa, Homo Sapiens
  sequence located in DAG1 at 753-762 and may interact with Sequence 3392 in this patent.
TVIPAVVVAA

SEQ ID NO: 3392 - protein, 10 aa, Homo Sapiens
  sequence located in EIF4B at 263-272 and may interact with Sequence 3391 in this patent.
SRDYDRGYDS

SEQ ID NO: 3393 - protein, 10 aa, Homo Sapiens
  sequence located in DAG1 at 754-763 and may interact with Sequence 3394 in this patent.
VIPAVVVAAI

SEQ ID NO: 3394 - protein, 10 aa, Homo Sapiens
  sequence located in EIF4B at 316-325 and may interact with Sequence 3393 in this patent.
YSRDDYRRDD

SEQ ID NO: 3395 - protein, 10 aa, Homo Sapiens
  sequence located in DAG1 at 367-376 and may interact with Sequence 3396 in this patent.
TVTIRTRGAI

SEQ ID NO: 3396 - protein, 10 aa, Homo Sapiens
  sequence located in IRS1 at 739-748 and may interact with Sequence 3395 in this patent.
GDSNTSSPSD

SEQ ID NO: 3397 - protein, 10 aa, Homo Sapiens
  sequence located in DAG1 at 339-348 and may interact with Sequence 3398 in this patent.
VPTPTSPAIA

SEQ ID NO: 3398 - protein, 10 aa, Homo Sapiens
  sequence located in KRT9 at 532-541 and may interact with Sequence 3397 in this patent.
GYGGGSGGGH

SEQ ID NO: 3399 - protein, 10 aa, Homo Sapiens
  sequence located in DAG1 at 340-349 and may interact with Sequence 3400 in this patent.
PTPTSPAIAP

SEQ ID NO: 3400 - protein, 10 aa, Homo Sapiens
  sequence located in KRT9 at 569-578 and may interact with Sequence 3399 in this patent.
GGYGGGSGSR

SEQ ID NO: 3401 - protein, 10 aa, Homo Sapiens
  sequence located in DAG1 at 340-349 and may interact with Sequence 3402 in this patent.
PTPTSPAIAP

SEQ ID NO: 3402 - protein, 10 aa, Homo Sapiens
  sequence located in KRT9 at 531-540 and may interact with Sequence 3401 in this patent.
GGYGGGSGGG

SEQ ID NO: 3403 - protein, 10 aa, Homo Sapiens
  sequence located in DAG1 at 340-349 and may interact with Sequence 3404 in this patent.
PTPTSPAIAP

SEQ ID NO: 3404 - protein, 10 aa, Homo Sapiens
  sequence located in KRT9 at 517-526 and may interact with Sequence 3403 in this patent.
GSYGGGSGSG

SEQ ID NO: 3405 - protein, 10 aa, Homo Sapiens
  sequence located in DAG1 at 340-349 and may interact with Sequence 3406 in this patent.
PTPTSPAIAP

SEQ ID NO: 3406 - protein, 10 aa, Homo Sapiens
  sequence located in KRT9 at 503-512 and may interact with Sequence 3405 in this patent.
GGYGGGSGSR

SEQ ID NO: 3407 - protein, 10 aa, Homo Sapiens
  sequence located in DAG1 at 340-349 and may interact with Sequence 3408 in this patent.
PTPTSPAIAP

SEQ ID NO: 3408 - protein, 10 aa, Homo Sapiens
  sequence located in KRT9 at 482-491 and may interact with Sequence 3407 in this patent.
GSYGRGSRGG

SEQ ID NO: 3409 - protein, 10 aa, Homo Sapiens
  sequence located in DAG1 at 341-350 and may interact with Sequence 3410 in this patent.
TPTSPAIAPP

SEQ ID NO: 3410 - protein, 10 aa, Homo Sapiens
  sequence located in KRT9 at 568-577 and may interact with Sequence 3409 in this patent.
GGGYGGGSGS

SEQ ID NO: 3411 - protein, 10 aa, Homo Sapiens
  sequence located in DAG1 at 341-350 and may interact with Sequence 3412 in this patent.
TPTSPAIAPP

SEQ ID NO: 3412 - protein, 10 aa, Homo Sapiens
  sequence located in KRT9 at 530-539 and may interact with Sequence 3411 in this patent.
GGGYGGGSGG

SEQ ID NO: 3413 - protein, 10 aa, Homo Sapiens
  sequence located in DAG1 at 341-350 and may interact with Sequence 3414 in this patent.
TPTSPAIAPP

SEQ ID NO: 3414 - protein, 10 aa, Homo Sapiens
  sequence located in KRT9 at 516-525 and may interact with Sequence 3413 in this patent.
GGSYGGGSGS

SEQ ID NO: 3415 - protein, 10 aa, Homo Sapiens
  sequence located in DAG1 at 341-350 and may interact with Sequence 3416 in this patent.
TPTSPAIAPP

SEQ ID NO: 3416 - protein, 10 aa, Homo Sapiens
  sequence located in KRT9 at 502-511 and may interact with Sequence 3415 in this patent.
GGGYGGGSGS

SEQ ID NO: 3417 - protein, 10 aa, Homo Sapiens
  sequence located in DAG1 at 341-350 and may interact with Sequence 3418 in this patent.
TPTSPAIAPP

SEQ ID NO: 3418 - protein, 10 aa, Homo Sapiens
  sequence located in KRT9 at 481-490 and may interact with Sequence 3417 in this patent.
GGSYGRGSRG

SEQ ID NO: 3419 - protein, 10 aa, Homo Sapiens
  sequence located in DAG1 at 342-351 and may interact with Sequence 3420 in this patent.
PTSPAIAPPT

SEQ ID NO: 3420 - protein, 10 aa, Homo Sapiens
  sequence located in KRT9 at 608-617 and may interact with Sequence 3419 in this patent.
SGGGYGGGSG

SEQ ID NO: 3421 - protein, 10 aa, Homo Sapiens
  sequence located in DAG1 at 342-351 and may interact with Sequence 3422 in this patent.
PTSPAIAPPT

SEQ ID NO: 3422 - protein, 10 aa, Homo Sapiens
  sequence located in KRT9 at 567-576 and may interact with Sequence 3421 in this patent.
SGGGYGGGSG

SEQ ID NO: 3423 - protein, 10 aa, Homo Sapiens
  sequence located in DAG1 at 342-351 and may interact with Sequence 3424 in this patent.
PTSPAIAPPT

SEQ ID NO: 3424 - protein, 10 aa, Homo Sapiens
  sequence located in KRT9 at 529-538 and may interact with Sequence 3423 in this patent.
SGGGYGGGSG

SEQ ID NO: 3425 - protein, 10 aa, Homo Sapiens
  sequence located in DAG1 at 342-351 and may interact with Sequence 3426 in this patent.
PTSPAIAPPT

SEQ ID NO: 3426 - protein, 10 aa, Homo Sapiens
  sequence located in KRT9 at 515-524 and may interact with Sequence 3425 in this patent.
SGGSYGGGSG

SEQ ID NO: 3427 - protein, 10 aa, Homo Sapiens
  sequence located in DAG1 at 342-351 and may interact with Sequence 3428 in this patent.
PTSPAIAPPT

SEQ ID NO: 3428 - protein, 10 aa, Homo Sapiens
  sequence located in KRT9 at 501-510 and may interact with Sequence 3427 in this patent.
SGGGYGGGSG

SEQ ID NO: 3429 - protein, 10 aa, Homo Sapiens
  sequence located in DAG1 at 342-351 and may interact with Sequence 3430 in this patent.
PTSPAIAPPT

SEQ ID NO: 3430 - protein, 10 aa, Homo Sapiens
  sequence located in KRT9 at 480-489 and may interact with Sequence 3429 in this patent.
SGGSYGRGSR

SEQ ID NO: 3431 - protein, 10 aa, Homo Sapiens
  sequence located in DAG1 at 430-439 and may interact with Sequence 3432 in this patent.
STPKPATPST

SEQ ID NO: 3432 - protein, 10 aa, Homo Sapiens
  sequence located in KRT9 at 90-99 and may interact with Sequence 3431 in this patent.
GGGSRGFGGA

SEQ ID NO: 3433 - protein, 10 aa, Homo Sapiens
  sequence located in DAG1 at 434-443 and may interact with Sequence 3434 in this patent.
PATPSTDSTT

SEQ ID NO: 3434 - protein, 10 aa, Homo Sapiens
  sequence located in KRT9 at 56-65 and may interact with Sequence 3433 in this patent.
SSRVCGRGGG

SEQ ID NO: 3435 - protein, 10 aa, Homo Sapiens
  sequence located in DAG1 at 435-444 and may interact with Sequence 3436 in this patent.
ATPSTDSTTT

SEQ ID NO: 3436 - protein, 10 aa, Homo Sapiens
  sequence located in KRT9 at 55-64 and may interact with Sequence 3435 in this patent.
GSSRVCGRGG

SEQ ID NO: 3437 - protein, 10 aa, Homo Sapiens
  sequence located in DAG1 at 342-351 and may interact with Sequence 3438 in this patent.
PTSPAIAPPT

SEQ ID NO: 3438 - protein, 10 aa, Homo Sapiens
  sequence located in KRT9 at 607-616 and may interact with Sequence 3437 in this patent.
GSGGGYGGGS

SEQ ID NO: 3439 - protein, 10 aa, Homo Sapiens
  sequence located in DAG1 at 342-351 and may interact with Sequence 3440 in this patent.
PTSPAIAPPT

SEQ ID NO: 3440 - protein, 10 aa, Homo Sapiens
  sequence located in KRT9 at 566-575 and may interact with Sequence 3439 in this patent.
GSGGGYGGGS

SEQ ID NO: 3441 - protein, 10 aa, Homo Sapiens
  sequence located in DAG1 at 342-351 and may interact with Sequence 3442 in this patent.
PTSPAIAPPT

SEQ ID NO: 3442 - protein, 10 aa, Homo Sapiens
  sequence located in KRT9 at 528-537 and may interact with Sequence 3441 in this patent.
GSGGGYGGGS

SEQ ID NO: 3443 - protein, 10 aa, Homo Sapiens
  sequence located in DAG1 at 342-351 and may interact with Sequence 3444 in this patent.
PTSPAIAPPT

SEQ ID NO: 3444 - protein, 10 aa, Homo Sapiens
  sequence located in KRT9 at 514-523 and may interact with Sequence 3443 in this patent.
GSGGSYGGGS

SEQ ID NO: 3445 - protein, 10 aa, Homo Sapiens
  sequence located in DAG1 at 342-351 and may interact with Sequence 3446 in this patent.
PTSPAIAPPT

SEQ ID NO: 3446 - protein, 10 aa, Homo Sapiens
  sequence located in KRT9 at 500-509 and may interact with Sequence 3445 in this patent.
GSGGGYGGGS

SEQ ID NO: 3447 - protein, 10 aa, Homo Sapiens
  sequence located in DAG1 at 342-351 and may interact with Sequence 3448 in this patent.
PTSPAIAPPT

SEQ ID NO: 3448 - protein, 10 aa, Homo Sapiens
  sequence located in KRT9 at 479-488 and may interact with Sequence 3447 in this patent.
GSGGSYGRGS

SEQ ID NO: 3449 - protein, 10 aa, Homo Sapiens
  sequence located in DAG1 at 341-350 and may interact with Sequence 3450 in this patent.
TPTSPAIAPP

SEQ ID NO: 3450 - protein, 10 aa, Homo Sapiens
  sequence located in KRT9 at 606-615 and may interact with Sequence 3449 in this patent.
SGSGGGYGGG

SEQ ID NO: 3451 - protein, 10 aa, Homo Sapiens
  sequence located in DAG1 at 341-350 and may interact with Sequence 3452 in this patent.
TPTSPAIAPP

SEQ ID NO: 3452 - protein, 10 aa, Homo Sapiens
  sequence located in KRT9 at 565-574 and may interact with Sequence 3451 in this patent.
GGSGGGYGGG

SEQ ID NO: 3453 - protein, 10 aa, Homo Sapiens
  sequence located in DAG1 at 341-350 and may interact with Sequence 3454 in this patent.
TPTSPAIAPP

SEQ ID NO: 3454 - protein, 10 aa, Homo Sapiens
  sequence located in KRT9 at 527-536 and may interact with Sequence 3453 in this patent.
GGSGGGYGGG

SEQ ID NO: 3455 - protein, 10 aa, Homo Sapiens
  sequence located in DAG1 at 341-350 and may interact with Sequence 3456 in this patent.
TPTSPAIAPP

SEQ ID NO: 3456 - protein, 10 aa, Homo Sapiens
  sequence located in KRT9 at 513-522 and may interact with Sequence 3455 in this patent.
GGSGGSYGGG

SEQ ID NO: 3457 - protein, 10 aa, Homo Sapiens
  sequence located in DAG1 at 341-350 and may interact with Sequence 3458 in this patent.
TPTSPAIAPP

SEQ ID NO: 3458 - protein, 10 aa, Homo Sapiens
  sequence located in KRT9 at 499-508 and may interact with Sequence 3457 in this patent.
GGSGGGYGGG

SEQ ID NO: 3459 - protein, 10 aa, Homo Sapiens
  sequence located in DAG1 at 341-350 and may interact with Sequence 3460 in this patent.
TPTSPAIAPP

SEQ ID NO: 3460 - protein, 10 aa, Homo Sapiens
  sequence located in KRT9 at 490-499 and may interact with Sequence 3459 in this patent.
GGSGGSYGGG

SEQ ID NO: 3461 - protein, 10 aa, Homo Sapiens
  sequence located in DAG1 at 341-350 and may interact with Sequence 3462 in this patent.
TPTSPAIAPP

SEQ ID NO: 3462 - protein, 10 aa, Homo Sapiens
  sequence located in KRT9 at 478-487 and may interact with Sequence 3461 in this patent.
GGSGGSYGRG

SEQ ID NO: 3463 - protein, 10 aa, Homo Sapiens
  sequence located in DAG1 at 340-349 and may interact with Sequence 3464 in this patent.
PTPTSPAIAP

SEQ ID NO: 3464 - protein, 10 aa, Homo Sapiens
  sequence located in KRT9 at 564-573 and may interact with Sequence 3463 in this patent.
GGGSGGGYGG

SEQ ID NO: 3465 - protein, 10 aa, Homo Sapiens
  sequence located in DAG1 at 340-349 and may interact with Sequence 3466 in this patent.
PTPTSPAIAP

SEQ ID NO: 3466 - protein, 10 aa, Homo Sapiens
  sequence located in KRT9 at 526-535 and may interact with Sequence 3465 in this patent.
GGGSGGGYGG

SEQ ID NO: 3467 - protein, 10 aa, Homo Sapiens
  sequence located in DAG1 at 340-349 and may interact with Sequence 3468 in this patent.
PTPTSPAIAP

SEQ ID NO: 3468 - protein, 10 aa, Homo Sapiens
  sequence located in KRT9 at 512-521 and may interact with Sequence 3467 in this patent.
RGGSGGSYGG

SEQ ID NO: 3469 - protein, 10 aa, Homo Sapiens
  sequence located in DAG1 at 340-349 and may interact with Sequence 3470 in this patent.
PTPTSPAIAP

SEQ ID NO: 3470 - protein, 10 aa, Homo Sapiens
  sequence located in KRT9 at 498-507 and may interact with Sequence 3469 in this patent.
GGGSGGGYGG

SEQ ID NO: 3471 - protein, 10 aa, Homo Sapiens
  sequence located in DAG1 at 340-349 and may interact with Sequence 3472 in this patent.
PTPTSPAIAP

SEQ ID NO: 3472 - protein, 10 aa, Homo Sapiens
  sequence located in KRT9 at 489-498 and may interact with Sequence 3471 in this patent.
RGGSGGSYGG

SEQ ID NO: 3473 - protein, 10 aa, Homo Sapiens
  sequence located in DAG1 at 340-349 and may interact with Sequence 3474 in this patent.
PTPTSPAIAP

SEQ ID NO: 3474 - protein, 10 aa, Homo Sapiens
  sequence located in KRT9 at 477-486 and may interact with Sequence 3473 in this patent.
RGGSGGSYGR

SEQ ID NO: 3475 - protein, 10 aa, Homo Sapiens
  sequence located in DAG1 at 728-737 and may interact with Sequence 3476 in this patent.
PSEAPPTEVP

SEQ ID NO: 3476 - protein, 10 aa, Homo Sapiens
  sequence located in KRT10 at 105-114 and may interact with Sequence 3475 in this patent.
GNFGGGSFGG

SEQ ID NO: 3477 - protein, 10 aa, Homo Sapiens
  sequence located in DAG1 at 728-737 and may interact with Sequence 3478 in this patent.
PSEAPPTEVP

SEQ ID NO: 3478 - protein, 10 aa, Homo Sapiens
  sequence located in KRT10 at 78-87 and may interact with Sequence 3477 in this patent.
GGFGGGSFHG

SEQ ID NO: 3479 - protein, 10 aa, Homo Sapiens
  sequence located in DAG1 at 434-443 and may interact with Sequence 3480 in this patent.
PATPSTDSTT

SEQ ID NO: 3480 - protein, 10 aa, Homo Sapiens
  sequence located in KRT14 at 20-29 and may interact with Sequence 3479 in this patent.
GGGIGAGSSR

SEQ ID NO: 3481 - protein, 10 aa, Homo Sapiens
  sequence located in DAG1 at 341-350 and may interact with Sequence 3482 in this patent.
TPTSPAIAPP

SEQ ID NO: 3482 - protein, 10 aa, Homo Sapiens
  sequence located in KRT15 OR KRTB at 54-63 and may interact with Sequence 3481 in this patent.
SGSGGGYGGG

SEQ ID NO: 3483 - protein, 10 aa, Homo Sapiens
  sequence located in DAG1 at 430-439 and may interact with Sequence 3484 in this patent.
STPKPATPST

SEQ ID NO: 3484 - protein, 10 aa, Homo Sapiens
  sequence located in KRT17 at 35-44 and may interact with Sequence 3483 in this patent.
GAGSCRLGSA

SEQ ID NO: 3485 - protein, 10 aa, Homo Sapiens
  sequence located in DAG1 at 434-443 and may interact with Sequence 3486 in this patent.
PATPSTDSTT

SEQ ID NO: 3486 - protein, 10 aa, Homo Sapiens
  sequence located in KRT17 at 20-29 and may interact with Sequence 3485 in this patent.
GGGIGAGSSR

SEQ ID NO: 3487 - protein, 10 aa, Homo Sapiens
  sequence located in DAG1 at 706-715 and may interact with Sequence 3488 in this patent.
TVTGSGSCRH

SEQ ID NO: 3488 - protein, 10 aa, Homo Sapiens
  sequence located in KRT2E at 551-560 and may interact with Sequence 3487 in this patent.
VSGGSGSGYG

SEQ ID NO: 3489 - protein, 10 aa, Homo Sapiens
  sequence located in DAG1 at 429-438 and may interact with Sequence 3490 in this patent.
VSTPKPATPS

SEQ ID NO: 3490 - protein, 10 aa, Homo Sapiens
  sequence located in KRT2E at 102-111 and may interact with Sequence 3489 in this patent.
YGGGFGGGRG

SEQ ID NO: 3491 - protein, 10 aa, Homo Sapiens
  sequence located in DAG1 at 428-437 and may interact with Sequence 3492 in this patent.
RVSTPKPATP

SEQ ID NO: 3492 - protein, 10 aa, Homo Sapiens
  sequence located in KRT2E at 101-110 and may interact with Sequence 3491 in this patent.
SYGGGFGGGR

SEQ ID NO: 3493 - protein, 10 aa, Homo Sapiens
  sequence located in DAG1 at 427-436 and may interact with Sequence 3494 in this patent.
PRVSTPKPAT

SEQ ID NO: 3494 - protein, 10 aa, Homo Sapiens
  sequence located in KRT2E at 100-109 and may interact with Sequence 3493 in this patent.
GSYGGGFGGG

SEQ ID NO: 3495 - protein, 10 aa, Homo Sapiens
  sequence located in DAG1 at 322-331 and may interact with Sequence 3496 in this patent.
TAIGPPTTAI

SEQ ID NO: 3496 - protein, 10 aa, Homo Sapiens
  sequence located in KRT1 OR KRTA at 558-567 and may interact with Sequence 3495 in this patent.
YGSGGGSYGS

SEQ ID NO: 3497 - protein, 10 aa, Homo Sapiens
  sequence located in DAG1 at 322-331 and may interact with Sequence 3498 in this patent.
TAIGPPTTAI

SEQ ID NO: 3498 - protein, 10 aa, Homo Sapiens
  sequence located in KRT1 OR KRTA at 531-540 and may interact with Sequence 3497 in this patent.
YGSGGGSYGS

SEQ ID NO: 3499 - protein, 10 aa, Homo Sapiens
  sequence located in DAG1 at 340-349 and may interact with Sequence 3500 in this patent.
PTPTSPAIAP

SEQ ID NO: 3500 - protein, 10 aa, Homo Sapiens
  sequence located in KRT1 OR KRTA at 584-593 and may interact with Sequence 3499 in this patent.
GGYRGGSGGG

SEQ ID NO: 3501 - protein, 10 aa, Homo Sapiens
  sequence located in DAG1 at 413-422 and may interact with Sequence 3502 in this patent.
PTAVATPPTT

SEQ ID NO: 3502 - protein, 10 aa, Homo Sapiens
  sequence located in KRT1 OR KRTA at 559-568 and may interact with Sequence 3501 in this patent.
GSGGGSYGSG

SEQ ID NO: 3503 - protein, 10 aa, Homo Sapiens
  sequence located in DAG1 at 413-422 and may interact with Sequence 3504 in this patent.
PTAVATPPTT

SEQ ID NO: 3504 - protein, 10 aa, Homo Sapiens
  sequence located in KRT1 OR KRTA at 552-561 and may interact with Sequence 3503 in this patent.
GSGGSSYGSG

SEQ ID NO: 3505 - protein, 10 aa, Homo Sapiens
  sequence located in DAG1 at 413-422 and may interact with Sequence 3506 in this patent.
PTAVATPPTT

SEQ ID NO: 3506 - protein, 10 aa, Homo Sapiens
  sequence located in KRT1 OR KRTA at 545-554 and may interact with Sequence 3505 in this patent.
GGGRGSYGSG

SEQ ID NO: 3507 - protein, 10 aa, Homo Sapiens
  sequence located in DAG1 at 413-422 and may interact with Sequence 3508 in this patent.
PTAVATPPTT

SEQ ID NO: 3508 - protein, 10 aa, Homo Sapiens
  sequence located in KRT1 OR KRTA at 532-541 and may interact with Sequence 3507 in this patent.
GSGGGSYGSG

SEQ ID NO: 3509 - protein, 10 aa, Homo Sapiens
  sequence located in DAG1 at 413-422 and may interact with Sequence 3510 in this patent.
PTAVATPPTT

SEQ ID NO: 3510 - protein, 10 aa, Homo Sapiens
  sequence located in KRT1 OR KRTA at 525-534 and may interact with Sequence 3509 in this patent.
GSGGSSYGSG

SEQ ID NO: 3511 - protein, 10 aa, Homo Sapiens
  sequence located in DAG1 at 429-438 and may interact with Sequence 3512 in this patent.
VSTPKPATPS

SEQ ID NO: 3512 - protein, 10 aa, Homo Sapiens
  sequence located in KRT1 OR KRTA at 84-93 and may interact with Sequence 3511 in this patent.
GRGSGFGGGY

SEQ ID NO: 3513 - protein, 10 aa, Homo Sapiens
  sequence located in DAG1 at 430-439 and may interact with Sequence 3514 in this patent.
STPKPATPST

SEQ ID NO: 3514 - protein, 10 aa, Homo Sapiens
  sequence located in KRT1 OR KRTA at 83-92 and may interact with Sequence 3513 in this patent.
GGRGSGFGGG

SEQ ID NO: 3515 - protein, 10 aa, Homo Sapiens
  sequence located in DAG1 at 435-444 and may interact with Sequence 3516 in this patent.
ATPSTDSTTT

SEQ ID NO: 3516 - protein, 10 aa, Homo Sapiens
  sequence located in KRT1 OR KRTA at 607-616 and may interact with Sequence 3515 in this patent.
SSGGSIGGRG

SEQ ID NO: 3517 - protein, 10 aa, Homo Sapiens
  sequence located in DAG1 at 434-443 and may interact with Sequence 3518 in this patent.
PATPSTDSTT

SEQ ID NO: 3518 - protein, 10 aa, Homo Sapiens
  sequence located in KRT1 OR KRTA at 606-615 and may interact with Sequence 3517 in this patent.
GSSGGSIGGR

SEQ ID NO: 3519 - protein, 10 aa, Homo Sapiens
  sequence located in DAG1 at 413-422 and may interact with Sequence 3520 in this patent.
PTAVATPPTT

SEQ ID NO: 3520 - protein, 10 aa, Homo Sapiens
  sequence located in KRT1 OR KRTA at 555-564 and may interact with Sequence 3519 in this patent.
GSSYGSGGGS

SEQ ID NO: 3521 - protein, 10 aa, Homo Sapiens
  sequence located in DAG1 at 413-422 and may interact with Sequence 3522 in this patent.
PTAVATPPTT

SEQ ID NO: 3522 - protein, 10 aa, Homo Sapiens
  sequence located in KRT1 OR KRTA at 548-557 and may interact with Sequence 3521 in this patent.
RGSYGSGGSS

SEQ ID NO: 3523 - protein, 10 aa, Homo Sapiens
  sequence located in DAG1 at 413-422 and may interact with Sequence 3524 in this patent.
PTAVATPPTT

SEQ ID NO: 3524 - protein, 10 aa, Homo Sapiens
  sequence located in KRT1 OR KRTA at 528-537 and may interact with Sequence 3523 in this patent.
GSSYGSGGGS

SEQ ID NO: 3525 - protein, 10 aa, Homo Sapiens
  sequence located in DAG1 at 413-422 and may interact with Sequence 3526 in this patent.
PTAVATPPTT

SEQ ID NO: 3526 - protein, 10 aa, Homo Sapiens
  sequence located in KRT1 OR KRTA at 521-530 and may interact with Sequence 3525 in this patent.
GGGYGSGGSS

SEQ ID NO: 3527 - protein, 10 aa, Homo Sapiens
  sequence located in DAG1 at 430-439 and may interact with Sequence 3528 in this patent.
STPKPATPST

SEQ ID NO: 3528 - protein, 10 aa, Homo Sapiens
  sequence located in KRT6A OR K6A at 40-49 and may interact with Sequence 3527 in this patent.
SRGSGGLGGA

SEQ ID NO: 3529 - protein, 10 aa, Homo Sapiens
  sequence located in DAG1 at 701-710 and may interact with Sequence 3530 in this patent.
KATSITVTGS

SEQ ID NO: 3530 - protein, 10 aa, Homo Sapiens
  sequence located in KRT6A OR K6A at 511-520 and may interact with Sequence 3529 in this patent.
GSSYSYGSGL

SEQ ID NO: 3531 - protein, 10 aa, Homo Sapiens
  sequence located in DAG1 at 430-439 and may interact with Sequence 3532 in this patent.
STPKPATPST

SEQ ID NO: 3532 - protein, 10 aa, Homo Sapiens
  sequence located in KRT6B OR K6B at 40-49 and may interact with Sequence 3531 in this patent.
SRGSGGLGGA

SEQ ID NO: 3533 - protein, 10 aa, Homo Sapiens
  sequence located in DAG1 at 701-710 and may interact with Sequence 3534 in this patent.
KATSITVTGS

SEQ ID NO: 3534 - protein, 10 aa, Homo Sapiens
  sequence located in KRT6B OR K6B at 511-520 and may interact with Sequence 3533 in this patent.
GSSYSYGSGL

SEQ ID NO: 3535 - protein, 10 aa, Homo Sapiens
  sequence located in DAG1 at 430-439 and may interact with Sequence 3536 in this patent.
STPKPATPST

SEQ ID NO: 3536 - protein, 10 aa, Homo Sapiens
  sequence located in KRT6F at 40-49 and may interact with Sequence 3535 in this patent.
SRGSGGLGGA

SEQ ID NO: 3537 - protein, 10 aa, Homo Sapiens
  sequence located in DAG1 at 701-710 and may interact with Sequence 3538 in this patent.
KATSITVTGS

SEQ ID NO: 3538 - protein, 10 aa, Homo Sapiens
  sequence located in KRT6F at 511-520 and may interact with Sequence 3537 in this patent.
GSSYSYGSGL

SEQ ID NO: 3539 - protein, 10 aa, Homo Sapiens
  sequence located in DAG1 at 414-423 and may interact with Sequence 3540 in this patent.
TAVATPPTTT

SEQ ID NO: 3540 - protein, 10 aa, Homo Sapiens
  sequence located in Unknown at 187-196 and may interact with Sequence 3539 in this patent.
CGYSGGGSGG

SEQ ID NO: 3541 - protein, 10 aa, Homo Sapiens
  sequence located in DAG1 at 414-423 and may interact with Sequence 3542 in this patent.
TAVATPPTTT

SEQ ID NO: 3542 - protein, 10 aa, Homo Sapiens
  sequence located in Unknown at 57-66 and may interact with Sequence 3541 in this patent.
GGYSGGGCGG

SEQ ID NO: 3543 - protein, 10 aa, Homo Sapiens
  sequence located in DAG1 at 413-422 and may interact with Sequence 3544 in this patent.
PTAVATPPTT

SEQ ID NO: 3544 - protein, 10 aa, Homo Sapiens
  sequence located in Unknown at 56-65 and may interact with Sequence 3543 in this patent.
GGGYSGGGCG

SEQ ID NO: 3545 - protein, 10 aa, Homo Sapiens
  sequence located in DAG1 at 71-80 and may interact with Sequence 3546 in this patent.
TAVVGRSFRV

SEQ ID NO: 3546 - protein, 10 aa, Homo Sapiens
  sequence located in MKLP1 at 845-854 and may interact with Sequence 3545 in this patent.
SRHNPSAKSH

SEQ ID NO: 3547 - protein, 10 aa, Homo Sapiens
  sequence located in DAG1 at 70-79 and may interact with Sequence 3548 in this patent.
GTAVVGRSFR

SEQ ID NO: 3548 - protein, 10 aa, Homo Sapiens
  sequence located in MKLP1 at 844-853 and may interact with Sequence 3547 in this patent.
ASRHNPSAKS

SEQ ID NO: 3549 - protein, 10 aa, Homo Sapiens
  sequence located in DAG1 at 480-489 and may interact with Sequence 3550 in this patent.
IRTTTSGVPR

SEQ ID NO: 3550 - protein, 10 aa, Homo Sapiens
  sequence located in M6PR OR MPRD OR MPR46 at 2183-2192 and may interact with Sequence 3549 in this patent.
SRNPACSGAN

SEQ ID NO: 3551 - protein, 10 aa, Homo Sapiens
  sequence located in DAG1 at 481-490 and may interact with Sequence 3552 in this patent.
RTTTSGVPRG

SEQ ID NO: 3552 - protein, 10 aa, Homo Sapiens
  sequence located in M6PR OR MPRD OR MPR46 at 2182-2191 and may interact with Sequence 3551 in this patent.
SSRNPACSGA

SEQ ID NO: 3553 - protein, 10 aa, Homo Sapiens
  sequence located in DAG1 at 482-491 and may interact with Sequence 3554 in this patent.
TTTSGVPRGG

SEQ ID NO: 3554 - protein, 10 aa, Homo Sapiens
  sequence located in M6PR OR MPRD OR MPR46 at 2181-2190 and may interact with Sequence 3553 in this patent.
TSSRNPACSG

SEQ ID NO: 3555 - protein, 10 aa, Homo Sapiens
  sequence located in DAG1 at 65-74 and may interact with Sequence 3556 in this patent.
VGIPDGTAVV

SEQ ID NO: 3556 - protein, 10 aa, Homo Sapiens
  sequence located in MYF6 at 1260-1269 and may interact with Sequence 3555 in this patent.
HNGSAIRYSD

SEQ ID NO: 3557 - protein, 10 aa, Homo Sapiens
  sequence located in DAG1 at 66-75 and may interact with Sequence 3558 in this patent.
GIPDGTAVVG

SEQ ID NO: 3558 - protein, 10 aa, Homo Sapiens
  sequence located in MYF6 at 1259-1268 and may interact with Sequence 3557 in this patent.
SHNGSAIRYS

SEQ ID NO: 3559 - protein, 10 aa, Homo Sapiens
  sequence located in DAG1 at 4-13 and may interact with Sequence 3560 in this patent.
SVGLSLLLPL

SEQ ID NO: 3560 - protein, 10 aa, Homo Sapiens
  sequence located in MYH6 OR MYHCA at 369-378 and may interact with Sequence 3559 in this patent.
QREEQAEPDG

SEQ ID NO: 3561 - protein, 10 aa, Homo Sapiens
  sequence located in DAG1 at 4-13 and may interact with Sequence 3562 in this patent.
SVGLSLLLPL

SEQ ID NO: 3562 - protein, 10 aa, Homo Sapiens
  sequence located in MYH7 OR MYHCB at 369-378 and may interact with Sequence 3561 in this patent.
QREEQAEPDG

SEQ ID NO: 3563 - protein, 10 aa, Homo Sapiens
  sequence located in DAG1 at 475-484 and may interact with Sequence 3564 in this patent.
SPPTRIRTTT

SEQ ID NO: 3564 - protein, 10 aa, Homo Sapiens
  sequence located in NID2 at 780-789 and may interact with Sequence 3563 in this patent.
TGGSSYTCSC

SEQ ID NO: 3565 - protein, 10 aa, Homo Sapiens
  sequence located in DAG1 at 446-455 and may interact with Sequence 3566 in this patent.
TRRPTKKPRT

SEQ ID NO: 3566 - protein, 10 aa, Homo Sapiens
  sequence located in NUP62 at 142-151 and may interact with Sequence 3565 in this patent.
STSGSLFGPS

SEQ ID NO: 3567 - protein, 10 aa, Homo Sapiens
  sequence located in DAG1 at 445-454 and may interact with Sequence 3568 in this patent.
TTRRPTKKPR

SEQ ID NO: 3568 - protein, 10 aa, Homo Sapiens
  sequence located in NUP62 at 141-150 and may interact with Sequence 3567 in this patent.
GSTSGSLFGP

SEQ ID NO: 3569 - protein, 10 aa, Homo Sapiens
  sequence located in DAG1 at 430-439 and may interact with Sequence 3570 in this patent.
STPKPATPST

SEQ ID NO: 3570 - protein, 10 aa, Homo Sapiens
  sequence located in NCL at 674-683 and may interact with Sequence 3569 in this patent.
GRGRGGFGGR

SEQ ID NO: 3571 - protein, 10 aa, Homo Sapiens
  sequence located in DAG1 at 430-439 and may interact with Sequence 3572 in this patent.
STPKPATPST

SEQ ID NO: 3572 - protein, 10 aa, Homo Sapiens
  sequence located in NCL at 666-675 and may interact with Sequence 3571 in this patent.
RGGRGGFGGR

SEQ ID NO: 3573 - protein, 10 aa, Homo Sapiens
  sequence located in DAG1 at 430-439 and may interact with Sequence 3574 in this patent.
STPKPATPST

SEQ ID NO: 3574 - protein, 10 aa, Homo Sapiens
  sequence located in NCL at 653-662 and may interact with Sequence 3573 in this patent.
GGGRGGFGGR

SEQ ID NO: 3575 - protein, 10 aa, Homo Sapiens
  sequence located in DAG1 at 430-439 and may interact with Sequence 3576 in this patent.
STPKPATPST

SEQ ID NO: 3576 - protein, 10 aa, Homo Sapiens
  sequence located in NCL at 683-692 and may interact with Sequence 3575 in this patent.
RGGFRGGRGG

SEQ ID NO: 3577 - protein, 10 aa, Homo Sapiens
  sequence located in DAG1 at 430-439 and may interact with Sequence 3578 in this patent.
STPKPATPST

SEQ ID NO: 3578 - protein, 10 aa, Homo Sapiens
  sequence located in NCL at 669-678 and may interact with Sequence 3577 in this patent.
RGGFGGRGRG

SEQ ID NO: 3579 - protein, 10 aa, Homo Sapiens
  sequence located in DAG1 at 430-439 and may interact with Sequence 3580 in this patent.
STPKPATPST

SEQ ID NO: 3580 - protein, 10 aa, Homo Sapiens
  sequence located in NCL at 656-665 and may interact with Sequence 3579 in this patent.
RGGFGGRGGG

SEQ ID NO: 3581 - protein, 10 aa, Homo Sapiens
  sequence located in DAG1 at 414-423 and may interact with Sequence 3582 in this patent.
TAVATPPTTT

SEQ ID NO: 3582 - protein, 10 aa, Homo Sapiens
  sequence located in PLA2G5 at 45-54 and may interact with Sequence 3581 in this patent.
GCYCGWGGRG

SEQ ID NO: 3583 - protein, 10 aa, Homo Sapiens
  sequence located in DAG1 at 413-422 and may interact with Sequence 3584 in this patent.
PTAVATPPTT

SEQ ID NO: 3584 - protein, 10 aa, Homo Sapiens
  sequence located in PXR1 OR PEX5 at 811-820 and may interact with Sequence 3583 in this patent.
SRGRSGDSGG

SEQ ID NO: 3585 - protein, 10 aa, Homo Sapiens
  sequence located in DAG1 at 705-714 and may interact with Sequence 3586 in this patent.
ITVTGSGSCR

SEQ ID NO: 3586 - protein, 10 aa, Homo Sapiens
  sequence located in PKD1 at 316-325 and may interact with Sequence 3585 in this patent.
AAGPAASHRY

SEQ ID NO: 3587 - protein, 10 aa, Homo Sapiens
  sequence located in DAG1 at 68-77 and may interact with Sequence 3588 in this patent.
PDGTAVVGRS

SEQ ID NO: 3588 - protein, 10 aa, Homo Sapiens
  sequence located in RAB11B OR YPT3 at 77-86 and may interact with Sequence 3587 in this patent.
TSAYYRGAVG

SEQ ID NO: 3589 - protein, 10 aa, Homo Sapiens
  sequence located in DAG1 at 427-436 and may interact with Sequence 3590 in this patent.
PRVSTPKPAT

SEQ ID NO: 3590 - protein, 10 aa, Homo Sapiens
  sequence located in RBL2 OR RB2 at 593-602 and may interact with Sequence 3589 in this patent.
RADTGGLGRS

SEQ ID NO: 3591 - protein, 10 aa, Homo Sapiens
  sequence located in DAG1 at 275-284 and may interact with Sequence 3592 in this patent.
HGVEAPAREG

SEQ ID NO: 3592 - protein, 10 aa, Homo Sapiens
  sequence located in Unknown at 383-392 and may interact with Sequence 3591 in this patent.
VSDFGGRSLS

SEQ ID NO: 3593 - protein, 10 aa, Homo Sapiens
  sequence located in DAG1 at 166-175 and may interact with Sequence 3594 in this patent.
SVRTASPDPG

SEQ ID NO: 3594 - protein, 10 aa, Homo Sapiens
  sequence located in RPL4 OR RPL1 at 77-86 and may interact with Sequence 3593 in this patent.
PRVRGGGTHR

SEQ ID NO: 3595 - protein, 10 aa, Homo Sapiens
  sequence located in DAG1 at 430-439 and may interact with Sequence 3596 in this patent.
STPKPATPST

SEQ ID NO: 3596 - protein, 10 aa, Homo Sapiens
  sequence located in SSA2 OR RO60 at 224-233 and may interact with Sequence 3595 in this patent.
RGGFGGSRGG

SEQ ID NO: 3597 - protein, 10 aa, Homo Sapiens
  sequence located in DAG1 at 414-423 and may interact with Sequence 3598 in this patent.
TAVATPPTTT

SEQ ID NO: 3598 - protein, 10 aa, Homo Sapiens
  sequence located in HNRPF at 363-372 and may interact with Sequence 3597 in this patent.
GGYGSGGGSG

SEQ ID NO: 3599 - protein, 10 aa, Homo Sapiens
  sequence located in DAG1 at 413-422 and may interact with Sequence 3600 in this patent.
PTAVATPPTT

SEQ ID NO: 3600 - protein, 10 aa, Homo Sapiens
  sequence located in HNRPF at 362-371 and may interact with Sequence 3599 in this patent.
GGGYGSGGGS

SEQ ID NO: 3601 - protein, 10 aa, Homo Sapiens
  sequence located in DAG1 at 341-350 and may interact with Sequence 3602 in this patent.
TPTSPAIAPP

SEQ ID NO: 3602 - protein, 10 aa, Homo Sapiens
  sequence located in HNRPF at 254-263 and may interact with Sequence 3601 in this patent.
GGSRGSYGGG

SEQ ID NO: 3603 - protein, 10 aa, Homo Sapiens
  sequence located in DAG1 at 340-349 and may interact with Sequence 3604 in this patent.
PTPTSPAIAP

SEQ ID NO: 3604 - protein, 10 aa, Homo Sapiens
  sequence located in HNRPF at 253-262 and may interact with Sequence 3603 in this patent.
GGGSRGSYGG

SEQ ID NO: 3605 - protein, 10 aa, Homo Sapiens
  sequence located in DAG1 at 479-488 and may interact with Sequence 3606 in this patent.
RIRTTTSGVP

SEQ ID NO: 3606 - protein, 10 aa, Homo Sapiens
  sequence located in HNRPK OR HNRNPK at 372-381 and may interact with Sequence 3605 in this patent.
SYAGGRGSYG

SEQ ID NO: 3607 - protein, 10 aa, Homo Sapiens
  sequence located in DAG1 at 434-443 and may interact with Sequence 3608 in this patent.
PATPSTDSTT

SEQ ID NO: 3608 - protein, 10 aa, Homo Sapiens
  sequence located in RPS29 at 30-39 and may interact with Sequence 3607 in this patent.
GSGIRGRGRG

SEQ ID NO: 3609 - protein, 10 aa, Homo Sapiens
  sequence located in DAG1 at 848-857 and may interact with Sequence 3610 in this patent.
GEYTPLRDED

SEQ ID NO: 3610 - protein, 10 aa, Homo Sapiens
  sequence located in RPS6 at 93-102 and may interact with Sequence 3609 in this patent.
VFIAQRRILP

SEQ ID NO: 3611 - protein, 10 aa, Homo Sapiens
  sequence located in DAG1 at 704-713 and may interact with Sequence 3612 in this patent.
SITVTGSGSC

SEQ ID NO: 3612 - protein, 10 aa, Homo Sapiens
  sequence located in SFRS5 OR SRP40 OR HRS at 79-88 and may interact with Sequence 3611 in this patent.
GYSYGSRSGG

SEQ ID NO: 3613 - protein, 10 aa, Homo Sapiens
  sequence located in DAG1 at 476-485 and may interact with Sequence 3614 in this patent.
PPTRIRTTTS

SEQ ID NO: 3614 - protein, 10 aa, Homo Sapiens
  sequence located in SOX4 at 171-180 and may interact with Sequence 3613 in this patent.
GGGSSNAGGG

SEQ ID NO: 3615 - protein, 10 aa, Homo Sapiens
  sequence located in DAG1 at 475-484 and may interact with Sequence 3616 in this patent.
SPPTRIRTTT

SEQ ID NO: 3616 - protein, 10 aa, Homo Sapiens
  sequence located in SOX4 at 171-180 and may interact with Sequence 3615 in this patent.
GGGSSNAGGG

SEQ ID NO: 3617 - protein, 10 aa, Homo Sapiens
  sequence located in DAG1 at 255-264 and may interact with Sequence 3618 in this patent.
GALLSWKLGC

SEQ ID NO: 3618 - protein, 10 aa, Homo Sapiens
  sequence located in TAF2J OR TAFII20 OR TAF15 at 735-744 and may interact with Sequence 3617 in this patent.
PRKKRPLESG

SEQ ID NO: 3619 - protein, 10 aa, Homo Sapiens
  sequence located in DAG1 at 70-79 and may interact with Sequence 3620 in this patent.
GTAVVGRSFR

SEQ ID NO: 3620 - protein, 10 aa, Homo Sapiens
  sequence located in UBE3A OR E6AP at 77-86 and may interact with Sequence 3619 in this patent.
SKGAPNNSCS

SEQ ID NO: 3621 - protein, 10 aa, Homo Sapiens
  sequence located in DAG1 at 71-80 and may interact with Sequence 3622 in this patent.
TAVVGRSFRV

SEQ ID NO: 3622 - protein, 10 aa, Homo Sapiens
  sequence located in UBE3A OR E6AP at 76-85 and may interact with Sequence 3621 in this patent.
NSKGAPNNSC

SEQ ID NO: 3623 - skipped

SEQ ID NO: 3624 - protein, 10 aa, Homo Sapiens
  sequence located in ADRA1B at 28-37 and may interact with Sequence 3625 in this patent.
GGGSAGGAAP

SEQ ID NO: 3625 - protein, 10 aa, Homo Sapiens
  sequence located in ADRA1B at 28-37 and may interact with Sequence 3624 in this patent.
GGGSAGGAAP

SEQ ID NO: 3626 - protein, 10 aa, Homo Sapiens
  sequence located in ADRA1B at 29-38 and may interact with Sequence 3627 in this patent.
GGSAGGAAPS

SEQ ID NO: 3627 - protein, 10 aa, Homo Sapiens
  sequence located in ADRA1B at 27-36 and may interact with Sequence 3626 in this patent.
GGGGSAGGAA

SEQ ID NO: 3628 - protein, 10 aa, Homo Sapiens
  sequence located in A1BG at 361-370 and may interact with Sequence 3629 in this patent.
PFGGSAPSER

SEQ ID NO: 3629 - protein, 10 aa, Homo Sapiens
  sequence located in A1BG at 361-370 and may interact with Sequence 3628 in this patent.
PFGGSAPSER

SEQ ID NO: 3630 - protein, 10 aa, Homo Sapiens
  sequence located in CHRNB4 at 125-134 and may interact with Sequence 3631 in this patent.
YEVSVYTNLI

SEQ ID NO: 3631 - protein, 10 aa, Homo Sapiens
  sequence located in CHRNB4 at 125-134 and may interact with Sequence 3630 in this patent.
YEVSVYTNLI

SEQ ID NO: 3632 - protein, 10 aa, Homo Sapiens
  sequence located in CHRM5 at 273-282 and may interact with Sequence 3633 in this patent.
SSRRSTSTTG

SEQ ID NO: 3633 - protein, 10 aa, Homo Sapiens
  sequence located in CHRM5 at 273-282 and may interact with Sequence 3632 in this patent.
SSRRSTSTTG

SEQ ID NO: 3634 - protein, 10 aa, Homo Sapiens
  sequence located in ADD1 OR ADDA at 477-486 and may interact with Sequence 3635 in this patent.
GHRTSTSAVP

SEQ ID NO: 3635 - protein, 10 aa, Homo Sapiens
  sequence located in ADD1 OR ADDA at 477-486 and may interact with Sequence 3634 in this patent.
GHRTSTSAVP

SEQ ID NO: 3636 - protein, 10 aa, Homo Sapiens
  sequence located in ADH5 OR ADHX OR FDH at 36-45 and may interact with Sequence 3637 in this patent.
ELFDELVKKF

SEQ ID NO: 3637 - protein, 10 aa, Homo Sapiens
  sequence located in ADH5 OR ADHX OR FDH at 36-45 and may interact with Sequence 3636 in this patent.
ELFDELVKKF

SEQ ID NO: 3638 - protein, 10 aa, Homo Sapiens
  sequence located in AOX1 OR AO at 1017-1026 and may interact with Sequence 3639 in this patent.
GLASRAAGQA

SEQ ID NO: 3639 - protein, 10 aa, Homo Sapiens
  sequence located in AOX1 OR AO at 1017-1026 and may interact with Sequence 3638 in this patent.
GLASRAAGQA

SEQ ID NO: 3640 - protein, 10 aa, Homo Sapiens
  sequence located in Unknown at 295-304 and may interact with Sequence 3641 in this patent.
FFLRRSLALS

SEQ ID NO: 3641 - protein, 10 aa, Homo Sapiens
  sequence located in Unknown at 282-291 and may interact with Sequence 3640 in this patent.
RQSETPSQKK

SEQ ID NO: 3642 - protein, 10 aa, Homo Sapiens
  sequence located in Unknown at 296-305 and may interact with Sequence 3643 in this patent.
FLRRSLALSP

SEQ ID NO: 3643 - protein, 10 aa, Homo Sapiens
  sequence located in Unknown at 281-290 and may interact with Sequence 3642 in this patent.
WRQSETPSQK

SEQ ID NO: 3644 - protein, 10 aa, Homo Sapiens
  sequence located in Unknown at 297-306 and may interact with Sequence 3645 in this patent.
LRRSLALSPG

SEQ ID NO: 3645 - protein, 10 aa, Homo Sapiens
  sequence located in Unknown at 280-289 and may interact with Sequence 3644 in this patent.
AWRQSETPSQ

SEQ ID NO: 3646 - protein, 10 aa, Homo Sapiens
  sequence located in Unknown at 298-307 and may interact with Sequence 3647 in this patent.
RRSLALSPGW

SEQ ID NO: 3647 - protein, 10 aa, Homo Sapiens
  sequence located in Unknown at 279-288 and may interact with Sequence 3646 in this patent.
PAWRQSETPS

SEQ ID NO: 3648 - protein, 10 aa, Homo Sapiens
  sequence located in Unknown at 299-308 and may interact with Sequence 3649 in this patent.
RSLALSPGWS

SEQ ID NO: 3649 - protein, 10 aa, Homo Sapiens
  sequence located in Unknown at 278-287 and may interact with Sequence 3648 in this patent.
TPAWRQSETP

SEQ ID NO: 3650 - protein, 10 aa, Homo Sapiens
  sequence located in Unknown at 576-585 and may interact with Sequence 3651 in this patent.
DYRREPPRPA

SEQ ID NO: 3651 - protein, 10 aa, Homo Sapiens
  sequence located in Unknown at 1-10 and may interact with Sequence 3650 in this patent.
GRARWLTPVI

SEQ ID NO: 3652 - protein, 10 aa, Homo Sapiens
  sequence located in Unknown at 5-14 and may interact with Sequence 3653 in this patent.
WLTPVIPALW

SEQ ID NO: 3653 - protein, 10 aa, Homo Sapiens
  sequence located in Unknown at 572-581 and may interact with Sequence 3652 in this patent.
PKCWDYRREP

SEQ ID NO: 3654 - protein, 10 aa, Homo Sapiens
  sequence located in AMFR at 156-165 and may interact with Sequence 3655 in this patent.
WGGGRSGGSE

SEQ ID NO: 3655 - protein, 10 aa, Homo Sapiens
  sequence located in AMFR at 62-71 and may interact with Sequence 3654 in this patent.
FRSSRPPSAP

SEQ ID NO: 3656 - protein, 10 aa, Homo Sapiens
  sequence located in AMFR at 157-166 and may interact with Sequence 3657 in this patent.
GGGRSGGSEP

SEQ ID NO: 3657 - protein, 10 aa, Homo Sapiens
  sequence located in AMFR at 61-70 and may interact with Sequence 3656 in this patent.
GFRSSRPPSA

SEQ ID NO: 3658 - protein, 10 aa, Homo Sapiens
  sequence located in AOC2 at 56-65 and may interact with Sequence 3659 in this patent.
LGGSYVGPTQ

SEQ ID NO: 3659 - protein, 10 aa, Homo Sapiens
  sequence located in AOC2 at 56-65 and may interact with Sequence 3658 in this patent.
LGGSYVGPTQ

SEQ ID NO: 3660 - protein, 10 aa, Homo Sapiens
  sequence located in APOB at 1998-2007 and may interact with Sequence 3661 in this patent.
AYNTKDKIGV

SEQ ID NO: 3661 - protein, 10 aa, Homo Sapiens
  sequence located in APOB at 484-493 and may interact with Sequence 3660 in this patent.
YTYLILRVIG

SEQ ID NO: 3662 - protein, 10 aa, Homo Sapiens
  sequence located in APOB at 4099-4108 and may interact with Sequence 3663 in this patent.
EVSSKLRRNL

SEQ ID NO: 3663 - protein, 10 aa, Homo Sapiens
  sequence located in APOB at 4099-4108 and may interact with Sequence 3662 in this patent.
EVSSKLRRNL

SEQ ID NO: 3664 - protein, 10 aa, Homo Sapiens
  sequence located in APC OR DP2.5 at 2121-2130 and may interact with Sequence 3665 in this patent.
AACLSRQASS

SEQ ID NO: 3665 - protein, 10 aa, Homo Sapiens
  sequence located in APC OR DP2.5 at 2121-2130 and may interact with Sequence 3664 in this patent.
AACLSRQASS

SEQ ID NO: 3666 - protein, 10 aa, Homo Sapiens
  sequence located in APC OR DP2.5 at 2327-2336 and may interact with Sequence 3667 in this patent.
NSISPGRNGI

SEQ ID NO: 3667 - protein, 10 aa, Homo Sapiens
  sequence located in APC OR DP2.5 at 2327-2336 and may interact with Sequence 3666 in this patent.
NSISPGRNGI

SEQ ID NO: 3668 - protein, 10 aa, Homo Sapiens
  sequence located in APC OR DP2.5 at 2328-2337 and may interact with Sequence 3669 in this patent.
SISPGRNGIS

SEQ ID NO: 3669 - protein, 10 aa, Homo Sapiens
  sequence located in APC OR DP2.5 at 2326-2335 and may interact with Sequence 3668 in this patent.
RNSISPGRNG

SEQ ID NO: 3670 - protein, 10 aa, Homo Sapiens
  sequence located in APC OR DP2.5 at 2329-2338 and may interact with Sequence 3671 in this patent.
ISPGRNGISP

SEQ ID NO: 3671 - protein, 10 aa, Homo Sapiens
  sequence located in APC OR DP2.5 at 2325-2334 and may interact with Sequence 3670 in this patent.
GRNSISPGRN

SEQ ID NO: 3672 - protein, 10 aa, Homo Sapiens
  sequence located in Unknown at 95-104 and may interact with Sequence 3673 in this patent.
DGRAPGGASV

SEQ ID NO: 3673 - protein, 10 aa, Homo Sapiens
  sequence located in Unknown at 95-104 and may interact with Sequence 3672 in this patent.
DGRAPGGASV

SEQ ID NO: 3674 - protein, 10 aa, Homo Sapiens
  sequence located in Unknown at 96-105 and may interact with Sequence 3675 in this patent.
GRAPGGASVH

SEQ ID NO: 3675 - protein, 10 aa, Homo Sapiens
  sequence located in Unknown at 94-103 and may interact with Sequence 3674 in this patent.
MDGRAPGGAS

SEQ ID NO: 3676 - protein, 10 aa, Homo Sapiens
  sequence located in ASPH at 16-25 and may interact with Sequence 3677 in this patent.
SGSGSGSTSA

SEQ ID NO: 3677 - protein, 10 aa, Homo Sapiens
  sequence located in ASPH at 16-25 and may interact with Sequence 3676 in this patent.
SGSGSGSTSA

SEQ ID NO: 3678 - protein, 10 aa, Homo Sapiens
  sequence located in ASPH at 17-26 and may interact with Sequence 3679 in this patent.
GSGSGSTSAG

SEQ ID NO: 3679 - protein, 10 aa, Homo Sapiens
  sequence located in ASPH at 15-24 and may interact with Sequence 3678 in this patent.
SSGSGSGSTS

SEQ ID NO: 3680 - protein, 10 aa, Homo Sapiens
  sequence located in ASPH at 17-26 and may interact with Sequence 3681 in this patent.
GSGSGSTSAG

SEQ ID NO: 3681 - protein, 10 aa, Homo Sapiens
  sequence located in ASPH at 18-27 and may interact with Sequence 3680 in this patent.
SGSGSTSAGS

SEQ ID NO: 3682 - protein, 10 aa, Homo Sapiens
  sequence located in ASPH at 16-25 and may interact with Sequence 3683 in this patent.
SGSGSGSTSA

SEQ ID NO: 3683 - protein, 10 aa, Homo Sapiens
  sequence located in ASPH at 17-26 and may interact with Sequence 3682 in this patent.
GSGSGSTSAG

SEQ ID NO: 3684 - protein, 10 aa, Homo Sapiens
  sequence located in ATOH1 OR ATH1 at 315-324 and may interact with Sequence 3685 in this patent.
PTPSTGGRRR

SEQ ID NO: 3685 - protein, 10 aa, Homo Sapiens
  sequence located in ATOH1 OR ATH1 at 315-324 and may interact with Sequence 3684 in this patent.
PTPSTGGRRR

SEQ ID NO: 3686 - protein, 10 aa, Homo Sapiens
  sequence located in ATP5A1 at 455-464 and may interact with Sequence 3687 in this patent.
AATQQLLSRG

SEQ ID NO: 3687 - protein, 10 aa, Homo Sapiens
  sequence located in ATP5A1 at 455-464 and may interact with Sequence 3686 in this patent.
AATQQLLSRG

SEQ ID NO: 3688 - protein, 10 aa, Homo Sapiens
  sequence located in ATP5A1 at 456-465 and may interact with Sequence 3689 in this patent.
ATQQLLSRGV

SEQ ID NO: 3689 - protein, 10 aa, Homo Sapiens
  sequence located in ATP5A1 at 454-463 and may interact with Sequence 3688 in this patent.
DAATQQLLSR

SEQ ID NO: 3690 - protein, 10 aa, Homo Sapiens
  sequence located in ATP5E at 36-45 and may interact with Sequence 3691 in this patent.
AEEERRIAAE

SEQ ID NO: 3691 - protein, 10 aa, Homo Sapiens
  sequence located in ATP5E at 12-21 and may interact with Sequence 3690 in this patent.
LGRYSALFLG

SEQ ID NO: 3692 - protein, 10 aa, Homo Sapiens
  sequence located in SLC4A3 OR AE3 at 1178-1187 and may interact with Sequence 3693 in this patent.
SLAFPFLLLL

SEQ ID NO: 3693 - protein, 10 aa, Homo Sapiens
  sequence located in SLC4A3 OR AE3 at 141-150 and may interact with Sequence 3692 in this patent.
EEEEEGESEA

SEQ ID NO: 3694 - protein, 10 aa, Homo Sapiens
  sequence located in BCR OR BCR1 at 127-136 and may interact with Sequence 3695 in this patent.
RPGTARRPGA

SEQ ID NO: 3695 - protein, 10 aa, Homo Sapiens
  sequence located in BCR OR BCR1 at 127-136 and may interact with Sequence 3694 in this patent.
RPGTARRPGA

SEQ ID NO: 3696 - protein, 10 aa, Homo Sapiens
  sequence located in BMP1 at 116-125 and may interact with Sequence 3697 in this patent.
SRSRRAATSR

SEQ ID NO: 3697 - protein, 10 aa, Homo Sapiens
  sequence located in BMP1 at 116-125 and may interact with Sequence 3696 in this patent.
SRSRRAATSR

SEQ ID NO: 3698 - protein, 10 aa, Homo Sapiens
  sequence located in BMP1 at 117-126 and may interact with Sequence 3699 in this patent.
RSRRAATSRP

SEQ ID NO: 3699 - protein, 10 aa, Homo Sapiens
  sequence located in BMP1 at 115-124 and may interact with Sequence 3698 in this patent.
RSRSRRAATS

SEQ ID NO: 3700 - protein, 10 aa, Homo Sapiens
  sequence located in BMP6 at 191-200 and may interact with Sequence 3701 in this patent.
GSGSGGASPL

SEQ ID NO: 3701 - protein, 10 aa, Homo Sapiens
  sequence located in BMP6 at 373-382 and may interact with Sequence 3700 in this patent.
TRSASSRRRQ

SEQ ID NO: 3702 - protein, 10 aa, Homo Sapiens
  sequence located in CACNA1C OR CACNL1A1 OR CCHL1A1 OR CACH2 OR CACN2 at 1025-1034 and may interact with Sequence 3703 in this patent.
PLRAINRAKG

SEQ ID NO: 3703 - protein, 10 aa, Homo Sapiens
  sequence located in CACNA1C OR CACNL1A1 OR CCHL1A1 OR CACH2 OR CACN2 at 1025-1034 and may interact with Sequence 3702 in this patent.
PLRAINRAKG

SEQ ID NO: 3704 - protein, 10 aa, Homo Sapiens
  sequence located in CACNA1C OR CACNL1A1 OR CCHL1A1 OR CACH2 OR CACN2 at 2038-2047 and may interact with Sequence 3705 in this patent.
PPATPGSRGW

SEQ ID NO: 3705 - protein, 10 aa, Homo Sapiens
  sequence located in CACNA1C OR CACNL1A1 OR CCHL1A1 OR CACH2 OR CACN2 at 2038-2047 and may interact with Sequence 3704 in this patent.
PPATPGSRGW

SEQ ID NO: 3706 - protein, 10 aa, Homo Sapiens
  sequence located in CACNA1C OR CACNL1A1 OR CCHL1A1 OR CACH2 OR CACN2 at 2083-2092 and may interact with Sequence 3707 in this patent.
PGGGGSSAAR

SEQ ID NO: 3707 - protein, 10 aa, Homo Sapiens
  sequence located in CACNA1C OR CACNL1A1 OR CCHL1A1 OR CACH2 OR CACN2 at 2083-2092 and may interact with Sequence 3706 in this patent.
PGGGGSSAAR

SEQ ID NO: 3708 - protein, 10 aa, Homo Sapiens
  sequence located in CACNA1C OR CACNL1A1 OR CCHL1A1 OR CACH2 OR CACN2 at 2084-2093 and may interact with Sequence 3709 in this patent.
GGGGSSAARR

SEQ ID NO: 3709 - protein, 10 aa, Homo Sapiens
  sequence located in CACNA1C OR CACNL1A1 OR CCHL1A1 OR CACH2 OR CACN2 at 2082-2091 and may interact with Sequence 3708 in this patent.
TPGGGGSSAA

SEQ ID NO: 3710 - protein, 10 aa, Homo Sapiens
  sequence located in CACNA1C OR CACNL1A1 OR CCHL1A1 OR CACH2 OR CACN2 at 652-661 and may interact with Sequence 3711 in this patent.
ASLLLLLFLF

SEQ ID NO: 3711 - protein, 10 aa, Homo Sapiens
  sequence located in CACNA1C OR CACNL1A1 OR CCHL1A1 OR CACH2 OR CACN2 at 764-773 and may interact with Sequence 3710 in this patent.
SAQKEEEEEK

SEQ ID NO: 3712 - protein, 10 aa, Homo Sapiens
  sequence located in CACNA1D OR CACNL1A2 OR CCHL1A2 OR CACH3 OR CACN4 at 991-1000 and may interact with Sequence 3713 in this patent.
PLRAINRAKG

SEQ ID NO: 3713 - protein, 10 aa, Homo Sapiens
  sequence located in CACNA1D OR CACNL1A2 OR CCHL1A2 OR CACH3 OR CACN4 at 991-1000 and may interact with Sequence 3712 in this patent.
PLRAINRAKG

SEQ ID NO: 3714 - protein, 10 aa, Homo Sapiens
  sequence located in CACNA1D OR CACNL1A2 OR CCHL1A2 OR CACH3 OR CACN4 at 652-661 and may interact with Sequence 3715 in this patent.
SLLLLLFLFI

SEQ ID NO: 3715 - protein, 10 aa, Homo Sapiens
  sequence located in CACNA1D OR CACNL1A2 OR CCHL1A2 OR CACH3 OR CACN4 at 826-835 and may interact with Sequence 3714 in this patent.
GEEEEEEEED

SEQ ID NO: 3716 - protein, 10 aa, Homo Sapiens
  sequence located in CACNA1F OR CACNAF1 at 1180-1189 and may interact with Sequence 3717 in this patent.
GRARSGPRAT

SEQ ID NO: 3717 - protein, 10 aa, Homo Sapiens
  sequence located in CACNA1F OR CACNAF1 at 1180-1189 and may interact with Sequence 3716 in this patent.
GRARSGPRAT

SEQ ID NO: 3718 - protein, 10 aa, Homo Sapiens
  sequence located in CACNA1S OR CACNL1A3 OR CACH1 OR CACN1 at 904-913 and may interact with Sequence 3719 in this patent.
PLRAINRAKG

SEQ ID NO: 3719 - protein, 10 aa, Homo Sapiens
  sequence located in CACNA1S OR CACNL1A3 OR CACH1 OR CACN1 at 904-913 and may interact with Sequence 3718 in this patent.
PLRAINRAKG

SEQ ID NO: 3720 - protein, 10 aa, Homo Sapiens
  sequence located in CD22 at 58-67 and may interact with Sequence 3721 in this patent.
AGGALQSTAS

SEQ ID NO: 3721 - protein, 10 aa, Homo Sapiens
  sequence located in CD22 at 58-67 and may interact with Sequence 3720 in this patent.
AGGALQSTAS

SEQ ID NO: 3722 - protein, 10 aa, Homo Sapiens
  sequence located in CD37 at 211-220 and may interact with Sequence 3723 in this patent.
RHSADICAVP

SEQ ID NO: 3723 - protein, 10 aa, Homo Sapiens
  sequence located in CD37 at 211-220 and may interact with Sequence 3722 in this patent.
RHSADICAVP

SEQ ID NO: 3724 - protein, 10 aa, Homo Sapiens
  sequence located in CD37 at 212-221 and may interact with Sequence 3725 in this patent.
HSADICAVPA

SEQ ID NO: 3725 - protein, 10 aa, Homo Sapiens
  sequence located in CD37 at 210-219 and may interact with Sequence 3724 in this patent.
SRHSADICAV

SEQ ID NO: 3726 - protein, 10 aa, Homo Sapiens
  sequence located in Unknown at 137-146 and may interact with Sequence 3727 in this patent.
GVARARARNA

SEQ ID NO: 3727 - protein, 10 aa, Homo Sapiens
  sequence located in Unknown at 137-146 and may interact with Sequence 3726 in this patent.
GVARARARNA

SEQ ID NO: 3728 - protein, 10 aa, Homo Sapiens
  sequence located in Unknown at 138-147 and may interact with Sequence 3729 in this patent.
VARARARNAA

SEQ ID NO: 3729 - protein, 10 aa, Homo Sapiens
  sequence located in Unknown at 136-145 and may interact with Sequence 3728 in this patent.
SGVARARARN

SEQ ID NO: 3730 - protein, 10 aa, Homo Sapiens
  sequence located in CCNC at 228-237 and may interact with Sequence 3731 in this patent.
RQARARARLP

SEQ ID NO: 3731 - protein, 10 aa, Homo Sapiens
  sequence located in CCNC at 228-237 and may interact with Sequence 3730 in this patent.
RQARARARLP

SEQ ID NO: 3732 - protein, 10 aa, Homo Sapiens
  sequence located in ACACB OR ACC2 OR ACCB at 1064-1073 and may interact with Sequence 3733 in this patent.
QYASNITSVL

SEQ ID NO: 3733 - protein, 10 aa, Homo Sapiens
  sequence located in ACACB OR ACC2 OR ACCB at 1064-1073 and may interact with Sequence 3732 in this patent.
QYASNITSVL

SEQ ID NO: 3734 - protein, 10 aa, Homo Sapiens
  sequence located in ACACB OR ACC2 OR ACCB at 1065-1074 and may interact with Sequence 3735 in this patent.
YASNITSVLC

SEQ ID NO: 3735 - protein, 10 aa, Homo Sapiens
  sequence located in ACACB OR ACC2 OR ACCB at 1063-1072 and may interact with Sequence 3734 in this patent.
AQYASNITSV

SEQ ID NO: 3736 - protein, 10 aa, Homo Sapiens
  sequence located in Unknown at 1085-1094 and may interact with Sequence 3737 in this patent.
RAEDRSIFSA

SEQ ID NO: 3737 - protein, 10 aa, Homo Sapiens
  sequence located in Unknown at 1085-1094 and may interact with Sequence 3736 in this patent.
RAEDRSIFSA

SEQ ID NO: 3738 - protein, 10 aa, Homo Sapiens
  sequence located in Unknown at 1086-1095 and may interact with Sequence 3739 in this patent.
AEDRSIFSAV

SEQ ID NO: 3739 - protein, 10 aa, Homo Sapiens
  sequence located in Unknown at 1084-1093 and may interact with Sequence 3738 in this patent.
DRAEDRSIFS

SEQ ID NO: 3740 - protein, 10 aa, Homo Sapiens
  sequence located in CTAG at 44-53 and may interact with Sequence 3741 in this patent.
GPRGAGAARA

SEQ ID NO: 3741 - protein, 10 aa, Homo Sapiens
  sequence located in CTAG at 44-53 and may interact with Sequence 3740 in this patent.
GPRGAGAARA

SEQ ID NO: 3742 - protein, 10 aa, Homo Sapiens
  sequence located in GJA1 at 197-206 and may interact with Sequence 3743 in this patent.
CFLSRPTEKT

SEQ ID NO: 3743 - protein, 10 aa, Homo Sapiens
  sequence located in GJA1 at 197-206 and may interact with Sequence 3742 in this patent.
CFLSRPTEKT

SEQ ID NO: 3744 - protein, 10 aa, Homo Sapiens
  sequence located in GJA1 at 198-207 and may interact with Sequence 3745 in this patent.
FLSRPTEKTI

SEQ ID NO: 3745 - protein, 10 aa, Homo Sapiens
  sequence located in GJA1 at 196-205 and may interact with Sequence 3744 in this patent.
DCFLSRPTEK

SEQ ID NO: 3746 - protein, 10 aa, Homo Sapiens
  sequence located in GJA1 at 364-373 and may interact with Sequence 3747 in this patent.
SRASSRASSR

SEQ ID NO: 3747 - protein, 10 aa, Homo Sapiens
  sequence located in GJA1 at 364-373 and may interact with Sequence 3746 in this patent.
SRASSRASSR

SEQ ID NO: 3748 - protein, 10 aa, Homo Sapiens
  sequence located in Unknown at 20-29 and may interact with Sequence 3749 in this patent.
AGASAGASAG

SEQ ID NO: 3749 - protein, 10 aa, Homo Sapiens
  sequence located in Unknown at 20-29 and may interact with Sequence 3748 in this patent.
AGASAGASAG

SEQ ID NO: 3750 - protein, 10 aa, Homo Sapiens
  sequence located in DCC at 446-455 and may interact with Sequence 3751 in this patent.
RLSWRPPAEA

SEQ ID NO: 3751 - protein, 10 aa, Homo Sapiens
  sequence located in DCC at 446-455 and may interact with Sequence 3750 in this patent.
RLSWRPPAEA

SEQ ID NO: 3752 - protein, 10 aa, Homo Sapiens
  sequence located in DES at 36-45 and may interact with Sequence 3753 in this patent.
RAPFGSKGSS

SEQ ID NO: 3753 - protein, 10 aa, Homo Sapiens
  sequence located in DES at 36-45 and may interact with Sequence 3752 in this patent.
RAPFGSKGSS

SEQ ID NO: 3754 - protein, 10 aa, Homo Sapiens
  sequence located in ALDH6 at 260-269 and may interact with Sequence 3755 in this patent.
EVGKLVKEAA

SEQ ID NO: 3755 - protein, 10 aa, Homo Sapiens
  sequence located in ALDH6 at 97-106 and may interact with Sequence 3754 in this patent.
GRLLHQLADL

SEQ ID NO: 3756 - protein, 10 aa, Homo Sapiens
  sequence located in ALDH6 at 261-270 and may interact with Sequence 3757 in this patent.
VGKLVKEAAS

SEQ ID NO: 3757 - protein, 10 aa, Homo Sapiens
  sequence located in ALDH6 at 96-105 and may interact with Sequence 3756 in this patent.
RGRLLHQLAD

SEQ ID NO: 3758 - protein, 10 aa, Homo Sapiens
  sequence located in ALDH6 at 262-271 and may interact with Sequence 3759 in this patent.
GKLVKEAASR

SEQ ID NO: 3759 - protein, 10 aa, Homo Sapiens
  sequence located in ALDH6 at 95-104 and may interact with Sequence 3758 in this patent.
SRGRLLHQLA

SEQ ID NO: 3760 - protein, 10 aa, Homo Sapiens
  sequence located in ALDH8 at 248-257 and may interact with Sequence 3761 in this patent.
EVGKLIKEAA

SEQ ID NO: 3761 - protein, 10 aa, Homo Sapiens
  sequence located in ALDH8 at 85-94 and may interact with Sequence 3760 in this patent.
GRLLYKLADL

SEQ ID NO: 3762 - protein, 10 aa, Homo Sapiens
  sequence located in HSD11B2 OR HSD11K at 115-124 and may interact with Sequence 3763 in this patent.
ELNSPGAIEL

SEQ ID NO: 3763 - protein, 10 aa, Homo Sapiens
  sequence located in HSD11B2 OR HSD11K at 115-124 and may interact with Sequence 3762 in this patent.
ELNSPGAIEL

SEQ ID NO: 3764 - protein, 10 aa, Homo Sapiens
  sequence located in QDPR OR DHPR at 154-163 and may interact with Sequence 3765 in this patent.
SMYSLQGIHG

SEQ ID NO: 3765 - protein, 10 aa, Homo Sapiens
  sequence located in QDPR OR DHPR at 154-163 and may interact with Sequence 3764 in this patent.
SMYSLQGIHG

SEQ ID NO: 3766 - protein, 10 aa, Homo Sapiens
  sequence located in SDHA OR SDH2 OR SDHF at 103-112 and may interact with Sequence 3767 in this patent.
AQGGINAALG

SEQ ID NO: 3767 - protein, 10 aa, Homo Sapiens
  sequence located in SDHA OR SDH2 OR SDHF at 103-112 and may interact with Sequence 3766 in this patent.
AQGGINAALG

SEQ ID NO: 3768 - protein, 10 aa, Homo Sapiens
  sequence located in DIAPH1 OR DIAP1 at 6-15 and may interact with Sequence 3769 in this patent.
AAASGAGGGS

SEQ ID NO: 3769 - protein, 10 aa, Homo Sapiens
  sequence located in DIAPH1 OR DIAP1 at 6-15 and may interact with Sequence 3768 in this patent.
AAASGAGGGS

SEQ ID NO: 3770 - protein, 10 aa, Homo Sapiens
  sequence located in POLG OR MDP1 at 781-790 and may interact with Sequence 3771 in this patent.
AGPGGASGPR

SEQ ID NO: 3771 - protein, 10 aa, Homo Sapiens
  sequence located in POLG OR MDP1 at 781-790 and may interact with Sequence 3770 in this patent.
AGPGGASGPR

SEQ ID NO: 3772 - protein, 10 aa, Homo Sapiens
  sequence located in DSG1 at 830-839 and may interact with Sequence 3773 in this patent.
LGYGNVTVTE

SEQ ID NO: 3773 - protein, 10 aa, Homo Sapiens
  sequence located in DSG1 at 830-839 and may interact with Sequence 3772 in this patent.
LGYGNVTVTE

SEQ ID NO: 3774 - protein, 10 aa, Homo Sapiens
  sequence located in E2F5 at 287-296 and may interact with Sequence 3775 in this patent.
TSATDISSAG

SEQ ID NO: 3775 - protein, 10 aa, Homo Sapiens
  sequence located in E2F5 at 287-296 and may interact with Sequence 3774 in this patent.
TSATDISSAG

SEQ ID NO: 3776 - protein, 10 aa, Homo Sapiens
  sequence located in ECM1 at 526-535 and may interact with Sequence 3777 in this patent.
TGGTNISSTS

SEQ ID NO: 3777 - protein, 10 aa, Homo Sapiens
  sequence located in ECM1 at 526-535 and may interact with Sequence 3776 in this patent.
TGGTNISSTS

SEQ ID NO: 3778 - protein, 10 aa, Homo Sapiens
  sequence located in ELA2 at 105-114 and may interact with Sequence 3779 in this patent.
AAKAGAGLGG

SEQ ID NO: 3779 - protein, 10 aa, Homo Sapiens
  sequence located in ELA2 at 105-114 and may interact with Sequence 3778 in this patent.
AAKAGAGLGG

SEQ ID NO: 3780 - protein, 10 aa, Homo Sapiens
  sequence located in ERBB2 OR HER2 OR NGL OR NEU at 218-227 and may interact with Sequence 3781 in this patent.
TVCAGGCARC

SEQ ID NO: 3781 - protein, 10 aa, Homo Sapiens
  sequence located in ERBB2 OR HER2 OR NGL OR NEU at 1046-1055 and may interact with Sequence 3780 in this patent.
RHRSSSTRSG

SEQ ID NO: 3782 - protein, 10 aa, Homo Sapiens
  sequence located in Unknown at 87-96 and may interact with Sequence 3783 in this patent.
AQALELQGLG

SEQ ID NO: 3783 - protein, 10 aa, Homo Sapiens
  sequence located in Unknown at 87-96 and may interact with Sequence 3782 in this patent.
AQALELQGLG

SEQ ID NO: 3784 - protein, 10 aa, Homo Sapiens
  sequence located in ERK5 OR ERK4 at 543-552 and may interact with Sequence 3785 in this patent.
GAGASGGPST

SEQ ID NO: 3785 - protein, 10 aa, Homo Sapiens
  sequence located in ERK5 OR ERK4 at 543-552 and may interact with Sequence 3784 in this patent.
GAGASGGPST

SEQ ID NO: 3786 - protein, 10 aa, Homo Sapiens
  sequence located in EVI2B OR EVDB at 123-132 and may interact with Sequence 3787 in this patent.
TSARQLPSAR

SEQ ID NO: 3787 - protein, 10 aa, Homo Sapiens
  sequence located in EVI2B OR EVDB at 123-132 and may interact with Sequence 3786 in this patent.
TSARQLPSAR

SEQ ID NO: 3788 - protein, 10 aa, Homo Sapiens
  sequence located in EVX1 at 171-180 and may interact with Sequence 3789 in this patent.
SQGTLACSAS

SEQ ID NO: 3789 - protein, 10 aa, Homo Sapiens
  sequence located in EVX1 at 167-176 and may interact with Sequence 3788 in this patent.
GGGGSQGTLA

SEQ ID NO: 3790 - protein, 10 aa, Homo Sapiens
  sequence located in Unknown at 48-57 and may interact with Sequence 3791 in this patent.
VGLPARGKTY

SEQ ID NO: 3791 - protein, 10 aa, Homo Sapiens
  sequence located in Unknown at 48-57 and may interact with Sequence 3790 in this patent.
VGLPARGKTY

SEQ ID NO: 3792 - protein, 10 aa, Homo Sapiens
  sequence located in F8A at 41-50 and may interact with Sequence 3793 in this patent.
VGLPARGKTY

SEQ ID NO: 3793 - protein, 10 aa, Homo Sapiens
  sequence located in F8A at 41-50 and may interact with Sequence 3792 in this patent.
VGLPARGKTY

SEQ ID NO: 3794 - protein, 10 aa, Homo Sapiens
  sequence located in F5 at 1720-1729 and may interact with Sequence 3795 in this patent.
SPGSACRAWA

SEQ ID NO: 3795 - protein, 10 aa, Homo Sapiens
  sequence located in F5 at 1720-1729 and may interact with Sequence 3794 in this patent.
SPGSACRAWA

SEQ ID NO: 3796 - protein, 10 aa, Homo Sapiens
  sequence located in FBN1 OR FBN at 36-45 and may interact with Sequence 3797 in this patent.
ETRASRAKRR

SEQ ID NO: 3797 - protein, 10 aa, Homo Sapiens
  sequence located in FBN1 OR FBN at 1007-1016 and may interact with Sequence 3796 in this patent.
LCPRGPGFAT

SEQ ID NO: 3798 - protein, 10 aa, Homo Sapiens
  sequence located in FGF5 at 64-73 and may interact with Sequence 3799 in this patent.
AASLGSQGSG

SEQ ID NO: 3799 - protein, 10 aa, Homo Sapiens
  sequence located in FGF5 at 64-73 and may interact with Sequence 3798 in this patent.
AASLGSQGSG

SEQ ID NO: 3800 - protein, 10 aa, Homo Sapiens
  sequence located in FGFR1 OR FLG OR FGFBR OR FLT2 at 573-582 and may interact with Sequence 3801 in this patent.
LQARRPPGLE

SEQ ID NO: 3801 - protein, 10 aa, Homo Sapiens
  sequence located in FGFR1 OR FLG OR FGFBR OR FLT2 at 573-582 and may interact with Sequence 3800 in this patent.
LQARRPPGLE

SEQ ID NO: 3802 - protein, 10 aa, Homo Sapiens
  sequence located in SLC19A1 OR FLOT1 OR RFC1 at 490-499 and may interact with Sequence 3803 in this patent.
GLGGLQPAQS

SEQ ID NO: 3803 - protein, 10 aa, Homo Sapiens
  sequence located in SLC19A1 OR FLOT1 OR RFC1 at 490-499 and may interact with Sequence 3802 in this patent.
GLGGLQPAQS

SEQ ID NO: 3804 - protein, 10 aa, Homo Sapiens
  sequence located in FMO5 at 309-318 and may interact with Sequence 3805 in this patent.
TAAIFEDGSR

SEQ ID NO: 3805 - protein, 10 aa, Homo Sapiens
  sequence located in FMO5 at 309-318 and may interact with Sequence 3804 in this patent.
TAAIFEDGSR

SEQ ID NO: 3806 - protein, 10 aa, Homo Sapiens
  sequence located in FRAP at 551-560 and may interact with Sequence 3807 in this patent.
PLRHPGMPKG

SEQ ID NO: 3807 - protein, 10 aa, Homo Sapiens
  sequence located in FRAP at 551-560 and may interact with Sequence 3806 in this patent.
PLRHPGMPKG

SEQ ID NO: 3808 - protein, 10 aa, Homo Sapiens
  sequence located in FRAP at 552-561 and may interact with Sequence 3809 in this patent.
LRHPGMPKGL

SEQ ID NO: 3809 - protein, 10 aa, Homo Sapiens
  sequence located in FRAP at 550-559 and may interact with Sequence 3808 in this patent.
KPLRHPGMPK

SEQ ID NO: 3810 - protein, 10 aa, Homo Sapiens
  sequence located in FRDA OR X25 at 48-57 and may interact with Sequence 3811 in this patent.
ATCTPRRASS

SEQ ID NO: 3811 - protein, 10 aa, Homo Sapiens
  sequence located in FRDA OR X25 at 48-57 and may interact with Sequence 3810 in this patent.
ATCTPRRASS

SEQ ID NO: 3812 - protein, 10 aa, Homo Sapiens
  sequence located in FKHL8 OR FREAC4 at 94-103 and may interact with Sequence 3813 in this patent.
PAAGAGAGGG

SEQ ID NO: 3813 - protein, 10 aa, Homo Sapiens
  sequence located in FKHL8 OR FREAC4 at 94-103 and may interact with Sequence 3812 in this patent.
PAAGAGAGGG

SEQ ID NO: 3814 - protein, 10 aa, Homo Sapiens
  sequence located in FKHL8 OR FREAC4 at 95-104 and may interact with Sequence 3815 in this patent.
AAGAGAGGGG

SEQ ID NO: 3815 - protein, 10 aa, Homo Sapiens
  sequence located in FKHL8 OR FREAC4 at 93-102 and may interact with Sequence 3814 in this patent.
APAAGAGAGG

SEQ ID NO: 3816 - protein, 10 aa, Homo Sapiens
  sequence located in FKHL8 OR FREAC4 at 96-105 and may interact with Sequence 3817 in this patent.
AGAGAGGGGG

SEQ ID NO: 3817 - protein, 10 aa, Homo Sapiens
  sequence located in FKHL8 OR FREAC4 at 92-101 and may interact with Sequence 3816 in this patent.
PAPAAGAGAG

SEQ ID NO: 3818 - protein, 10 aa, Homo Sapiens
  sequence located in FKHL8 OR FREAC4 at 104-113 and may interact with Sequence 3819 in this patent.
GGGGGAGGGG

SEQ ID NO: 3819 - protein, 10 aa, Homo Sapiens
  sequence located in FKHL8 OR FREAC4 at 87-96 and may interact with Sequence 3818 in this patent.
PAPPGPAPAA

SEQ ID NO: 3820 - protein, 10 aa, Homo Sapiens
  sequence located in FKHL8 OR FREAC4 at 92-101 and may interact with Sequence 3821 in this patent.
PAPAAGAGAG

SEQ ID NO: 3821 - protein, 10 aa, Homo Sapiens
  sequence located in FKHL8 OR FREAC4 at 110-119 and may interact with Sequence 3820 in this patent.
GGGGSAGSGA

SEQ ID NO: 3822 - protein, 10 aa, Homo Sapiens
  sequence located in FKHL8 OR FREAC4 at 91-100 and may interact with Sequence 3823 in this patent.
GPAPAAGAGA

SEQ ID NO: 3823 - protein, 10 aa, Homo Sapiens
  sequence located in FKHL8 OR FREAC4 at 109-118 and may interact with Sequence 3822 in this patent.
AGGGGSAGSG

SEQ ID NO: 3824 - protein, 10 aa, Homo Sapiens
  sequence located in FKHL8 OR FREAC4 at 90-99 and may interact with Sequence 3825 in this patent.
PGPAPAAGAG

SEQ ID NO: 3825 - protein, 10 aa, Homo Sapiens
  sequence located in FKHL8 OR FREAC4 at 108-117 and may interact with Sequence 3824 in this patent.
GAGGGGSAGS

SEQ ID NO: 3826 - protein, 10 aa, Homo Sapiens
  sequence located in FKHL8 OR FREAC4 at 89-98 and may interact with Sequence 3827 in this patent.
PPGPAPAAGA

SEQ ID NO: 3827 - protein, 10 aa, Homo Sapiens
  sequence located in FKHL8 OR FREAC4 at 107-116 and may interact with Sequence 3826 in this patent.
GGAGGGGSAG

SEQ ID NO: 3828 - protein, 10 aa, Homo Sapiens
  sequence located in FKHL8 OR FREAC4 at 88-97 and may interact with Sequence 3829 in this patent.
APPGPAPAAG

SEQ ID NO: 3829 - protein, 10 aa, Homo Sapiens
  sequence located in FKHL8 OR FREAC4 at 106-115 and may interact with Sequence 3828 in this patent.
GGGAGGGGSA

SEQ ID NO: 3830 - protein, 10 aa, Homo Sapiens
  sequence located in FKHL8 OR FREAC4 at 87-96 and may interact with Sequence 3831 in this patent.
PAPPGPAPAA

SEQ ID NO: 3831 - protein, 10 aa, Homo Sapiens
  sequence located in FKHL8 OR FREAC4 at 105-114 and may interact with Sequence 3830 in this patent.
GGGGAGGGGS

SEQ ID NO: 3832 - protein, 10 aa, Homo Sapiens
  sequence located in FKHL8 OR FREAC4 at 86-95 and may interact with Sequence 3833 in this patent.
SPAPPGPAPA

SEQ ID NO: 3833 - protein, 10 aa, Homo Sapiens
  sequence located in FKHL8 OR FREAC4 at 104-113 and may interact with Sequence 3832 in this patent.
GGGGGAGGGG

SEQ ID NO: 3834 - protein, 10 aa, Homo Sapiens
  sequence located in FUT3 OR LE at 41-50 and may interact with Sequence 3835 in this patent.
ATGSPRAPSG

SEQ ID NO: 3835 - protein, 10 aa, Homo Sapiens
  sequence located in FUT3 OR LE at 41-50 and may interact with Sequence 3834 in this patent.
ATGSPRAPSG

SEQ ID NO: 3836 - protein, 10 aa, Homo Sapiens
  sequence located in FXR1 at 487-496 and may interact with Sequence 3837 in this patent.
GRGRGPPPAP

SEQ ID NO: 3837 - protein, 10 aa, Homo Sapiens
  sequence located in FXR1 at 487-496 and may interact with Sequence 3836 in this patent.
GRGRGPPPAP

SEQ ID NO: 3838 - protein, 10 aa, Homo Sapiens
  sequence located in FXR1 at 538-547 and may interact with Sequence 3839 in this patent.
PPPASARRRR

SEQ ID NO: 3839 - protein, 10 aa, Homo Sapiens
  sequence located in FXR1 at 538-547 and may interact with Sequence 3838 in this patent.
PPPASARRRR

SEQ ID NO: 3840 - protein, 10 aa, Homo Sapiens
  sequence located in FXR1 at 486-495 and may interact with Sequence 3841 in this patent.
GGRGRGPPPA

SEQ ID NO: 3841 - protein, 10 aa, Homo Sapiens
  sequence located in FXR1 at 538-547 and may interact with Sequence 3840 in this patent.
PPPASARRRR

SEQ ID NO: 3842 - protein, 10 aa, Homo Sapiens
  sequence located in E4TF1B OR GABPB at 59-68 and may interact with Sequence 3843 in this patent.
RAGVSRDART

SEQ ID NO: 3843 - protein, 10 aa, Homo Sapiens
  sequence located in E4TF1B OR GABPB at 59-68 and may interact with Sequence 3842 in this patent.
RAGVSRDART

SEQ ID NO: 3844 - protein, 10 aa, Homo Sapiens
  sequence located in E4TF1B OR GABPB at 60-69 and may interact with Sequence 3845 in this patent.
AGVSRDARTK

SEQ ID NO: 3845 - protein, 10 aa, Homo Sapiens
  sequence located in E4TF1B OR GABPB at 58-67 and may interact with Sequence 3844 in this patent.
LRAGVSRDAR

SEQ ID NO: 3846 - protein, 10 aa, Homo Sapiens
  sequence located in GALC at 451-460 and may interact with Sequence 3847 in this patent.
TTLTTGRKGS

SEQ ID NO: 3847 - protein, 10 aa, Homo Sapiens
  sequence located in GALC at 451-460 and may interact with Sequence 3846 in this patent.
TTLTTGRKGS

SEQ ID NO: 3848 - protein, 10 aa, Homo Sapiens
  sequence located in GAS1 at 294-303 and may interact with Sequence 3849 in this patent.
PRPGSGAAAS

SEQ ID NO: 3849 - protein, 10 aa, Homo Sapiens
  sequence located in GAS1 at 297-306 and may interact with Sequence 3848 in this patent.
GSGAAASGGR

SEQ ID NO: 3850 - protein, 10 aa, Homo Sapiens
  sequence located in CCKBR OR CCKRB at 310-319 and may interact with Sequence 3851 in this patent.
TAPGPGSGSR

SEQ ID NO: 3851 - protein, 10 aa, Homo Sapiens
  sequence located in CCKBR OR CCKRB at 310-319 and may interact with Sequence 3850 in this patent.
TAPGPGSGSR

SEQ ID NO: 3852 - protein, 10 aa, Homo Sapiens
  sequence located in GATA1 OR GF1 OR ERYF1 at 320-329 and may interact with Sequence 3853 in this patent.
SLGGTGAAEG

SEQ ID NO: 3853 - protein, 10 aa, Homo Sapiens
  sequence located in GATA1 OR GF1 OR ERYF1 at 320-329 and may interact with Sequence 3852 in this patent.
SLGGTGAAEG

SEQ ID NO: 3854 - protein, 10 aa, Homo Sapiens
  sequence located in AGAT at 5-14 and may interact with Sequence 3855 in this patent.
RCLRGGSRGA

SEQ ID NO: 3855 - protein, 10 aa, Homo Sapiens
  sequence located in AGAT at 38-47 and may interact with Sequence 3854 in this patent.
STQAATASSR

SEQ ID NO: 3856 - protein, 10 aa, Homo Sapiens
  sequence located in GNA12 at 191-200 and may interact with Sequence 3857 in this patent.
PSQQDILLAR

SEQ ID NO: 3857 - protein, 10 aa, Homo Sapiens
  sequence located in GNA12 at 191-200 and may interact with Sequence 3856 in this patent.
PSQQDILLAR

SEQ ID NO: 3858 - protein, 10 aa, Homo Sapiens
  sequence located in GNA15 OR GNA16 at 177-186 and may interact with Sequence 3859 in this patent.
PTAQDVLRSR

SEQ ID NO: 3859 - protein, 10 aa, Homo Sapiens
  sequence located in GNA15 OR GNA16 at 177-186 and may interact with Sequence 3858 in this patent.
PTAQDVLRSR

SEQ ID NO: 3860 - protein, 10 aa, Homo Sapiens
  sequence located in GNB2 at 134-143 and may interact with Sequence 3861 in this patent.
RVSRELPGHT

SEQ ID NO: 3861 - protein, 10 aa, Homo Sapiens
  sequence located in GNB2 at 134-143 and may interact with Sequence 3860 in this patent.
RVSRELPGHT

SEQ ID NO: 3862 - protein, 10 aa, Homo Sapiens
  sequence located in GNB2-RS1 at 103-112 and may interact with Sequence 3863 in this patent.
GHTKDVLSVA

SEQ ID NO: 3863 - protein, 10 aa, Homo Sapiens
  sequence located in GNB2-RS1 at 103-112 and may interact with Sequence 3862 in this patent.
GHTKDVLSVA

SEQ ID NO: 3864 - protein, 10 aa, Homo Sapiens
  sequence located in GRL OR NR3C1 at 406-415 and may interact with Sequence 3865 in this patent.
PSSSSTATTG

SEQ ID NO: 3865 - protein, 10 aa, Homo Sapiens
  sequence located in GRL OR NR3C1 at 406-415 and may interact with Sequence 3864 in this patent.
PSSSSTATTG

SEQ ID NO: 3866 - protein, 10 aa, Homo Sapiens
  sequence located in AGL OR GDE at 394-403 and may interact with Sequence 3867 in this patent.
GHGPKLGPVT

SEQ ID NO: 3867 - protein, 10 aa, Homo Sapiens
  sequence located in AGL OR GDE at 394-403 and may interact with Sequence 3866 in this patent.
GHGPKLGPVT

SEQ ID NO: 3868 - protein, 10 aa, Homo Sapiens
  sequence located in AGL OR GDE at 395-404 and may interact with Sequence 3869 in this patent.
HGPKLGPVTR

SEQ ID NO: 3869 - protein, 10 aa, Homo Sapiens
  sequence located in AGL OR GDE at 393-402 and may interact with Sequence 3868 in this patent.
AGHGPKLGPV

SEQ ID NO: 3870 - protein, 10 aa, Homo Sapiens
  sequence located in AGL OR GDE at 396-405 and may interact with Sequence 3871 in this patent.
GPKLGPVTRK

SEQ ID NO: 3871 - protein, 10 aa, Homo Sapiens
  sequence located in AGL OR GDE at 392-401 and may interact with Sequence 3870 in this patent.
LAGHGPKLGP

SEQ ID NO: 3872 - protein, 10 aa, Homo Sapiens
  sequence located in GSN at 737-746 and may interact with Sequence 3873 in this patent.
NRDRRTPITV

SEQ ID NO: 3873 - protein, 10 aa, Homo Sapiens
  sequence located in GSN at 737-746 and may interact with Sequence 3872 in this patent.
NRDRRTPITV

SEQ ID NO: 3874 - protein, 10 aa, Homo Sapiens
  sequence located in Unknown at 174-183 and may interact with Sequence 3875 in this patent.
AGGAGAGAPG

SEQ ID NO: 3875 - protein, 10 aa, Homo Sapiens
  sequence located in Unknown at 174-183 and may interact with Sequence 3874 in this patent.
AGGAGAGAPG

SEQ ID NO: 3876 - protein, 10 aa, Homo Sapiens
  sequence located in GRIK5 OR GRIK2 at 858-867 and may interact with Sequence 3877 in this patent.
TSRSRRRRRP

SEQ ID NO: 3877 - protein, 10 aa, Homo Sapiens
  sequence located in GRIK5 OR GRIK2 at 95-104 and may interact with Sequence 3876 in this patent.
GPSSSPASAS

SEQ ID NO: 3878 - protein, 10 aa, Homo Sapiens
  sequence located in GRIA1 OR GLUR1 OR GLUH1 at 122-131 and may interact with Sequence 3879 in this patent.
VLQLRPELQD

SEQ ID NO: 3879 - protein, 10 aa, Homo Sapiens
  sequence located in GRIA1 OR GLUR1 OR GLUH1 at 122-131 and may interact with Sequence 3878 in this patent.
VLQLRPELQD

SEQ ID NO: 3880 - protein, 10 aa, Homo Sapiens
  sequence located in GRIA1 OR GLUR1 OR GLUH1 at 667-676 and may interact with Sequence 3881 in this patent.
GSTKEFFRRS

SEQ ID NO: 3881 - protein, 10 aa, Homo Sapiens
  sequence located in GRIA1 OR GLUR1 OR GLUH1 at 667-676 and may interact with Sequence 3880 in this patent.
GSTKEFFRRS

SEQ ID NO: 3882 - protein, 10 aa, Homo Sapiens
  sequence located in GPC3 OR OCI5 at 364-373 and may interact with Sequence 3883 in this patent.
EDLFIDKKVL

SEQ ID NO: 3883 - protein, 10 aa, Homo Sapiens
  sequence located in GPC3 OR OCI5 at 364-373 and may interact with Sequence 3882 in this patent.
EDLFIDKKVL

SEQ ID NO: 3884 - protein, 10 aa, Homo Sapiens
  sequence located in GPR2 at 61-70 and may interact with Sequence 3885 in this patent.
ARRAARSPTS

SEQ ID NO: 3885 - protein, 10 aa, Homo Sapiens
  sequence located in GPR2 at 61-70 and may interact with Sequence 3884 in this patent.
ARRAARSPTS

SEQ ID NO: 3886 - protein, 10 aa, Homo Sapiens
  sequence located in GRB14 at 204-213 and may interact with Sequence 3887 in this patent.
SCNEKDIVDF

SEQ ID NO: 3887 - protein, 10 aa, Homo Sapiens
  sequence located in GRB14 at 89-98 and may interact with Sequence 3886 in this patent.
EVDDVFLIRA

SEQ ID NO: 3888 - protein, 10 aa, Homo Sapiens
  sequence located in GRB14 at 205-214 and may interact with Sequence 3889 in this patent.
CNEKDIVDFF

SEQ ID NO: 3889 - protein, 10 aa, Homo Sapiens
  sequence located in GRB14 at 88-97 and may interact with Sequence 3888 in this patent.
EEVDDVFLIR

SEQ ID NO: 3890 - protein, 10 aa, Homo Sapiens
  sequence located in SLC2A3 OR GLUT3 at 240-249 and may interact with Sequence 3891 in this patent.
ARKSLKRLTG

SEQ ID NO: 3891 - protein, 10 aa, Homo Sapiens
  sequence located in SLC2A3 OR GLUT3 at 240-249 and may interact with Sequence 3890 in this patent.
ARKSLKRLTG

SEQ ID NO: 3892 - protein, 10 aa, Homo Sapiens
  sequence located in SLC2A3 OR GLUT3 at 241-250 and may interact with Sequence 3893 in this patent.
RKSLKRLTGW

SEQ ID NO: 3893 - protein, 10 aa, Homo Sapiens
  sequence located in SLC2A3 OR GLUT3 at 239-248 and may interact with Sequence 3892 in this patent.
PARKSLKRLT

SEQ ID NO: 3894 - protein, 10 aa, Homo Sapiens
  sequence located in SLC2A3 OR GLUT3 at 242-251 and may interact with Sequence 3895 in this patent.
KSLKRLTGWA

SEQ ID NO: 3895 - protein, 10 aa, Homo Sapiens
  sequence located in SLC2A3 OR GLUT3 at 238-247 and may interact with Sequence 3894 in this patent.
GPARKSLKRL

SEQ ID NO: 3896 - protein, 10 aa, Homo Sapiens
  sequence located in Unknown at 49-58 and may interact with Sequence 3897 in this patent.
ASGGTSGSCS

SEQ ID NO: 3897 - protein, 10 aa, Homo Sapiens
  sequence located in Unknown at 47-56 and may interact with Sequence 3896 in this patent.
GGASGGTSGS

SEQ ID NO: 3898 - protein, 10 aa, Homo Sapiens
  sequence located in Unknown at 50-59 and may interact with Sequence 3899 in this patent.
SGGTSGSCSP

SEQ ID NO: 3899 - protein, 10 aa, Homo Sapiens
  sequence located in Unknown at 46-55 and may interact with Sequence 3898 in this patent.
GGGASGGTSG

SEQ ID NO: 3900 - protein, 10 aa, Homo Sapiens
  sequence located in Unknown at 51-60 and may interact with Sequence 3901 in this patent.
GGTSGSCSPA

SEQ ID NO: 3901 - protein, 10 aa, Homo Sapiens
  sequence located in Unknown at 45-54 and may interact with Sequence 3900 in this patent.
GGGGASGGTS

SEQ ID NO: 3902 - protein, 10 aa, Homo Sapiens
  sequence located in Unknown at 52-61 and may interact with Sequence 3903 in this patent.
GTSGSCSPAS

SEQ ID NO: 3903 - protein, 10 aa, Homo Sapiens
  sequence located in Unknown at 44-53 and may interact with Sequence 3902 in this patent.
GGGGGASGGT

SEQ ID NO: 3904 - protein, 10 aa, Homo Sapiens
  sequence located in Unknown at 53-62 and may interact with Sequence 3905 in this patent.
TSGSCSPASS

SEQ ID NO: 3905 - protein, 10 aa, Homo Sapiens
  sequence located in Unknown at 43-52 and may interact with Sequence 3904 in this patent.
GGGGGGASGG

SEQ ID NO: 3906 - protein, 10 aa, Homo Sapiens
  sequence located in Unknown at 41-50 and may interact with Sequence 3907 in this patent.
GGGGGGGGAS

SEQ ID NO: 3907 - protein, 10 aa, Homo Sapiens
  sequence located in Unknown at 128-137 and may interact with Sequence 3906 in this patent.
AAAAAAAAGG

SEQ ID NO: 3908 - protein, 10 aa, Homo Sapiens
  sequence located in Unknown at 39-48 and may interact with Sequence 3909 in this patent.
GTGGGGGGGG

SEQ ID NO: 3909 - protein, 10 aa, Homo Sapiens
  sequence located in Unknown at 118-127 and may interact with Sequence 3908 in this patent.
PGAAAAAAAA

SEQ ID NO: 3910 - protein, 10 aa, Homo Sapiens
  sequence located in HD OR IT15 at 2665-2674 and may interact with Sequence 3911 in this patent.
RAGVDIHSCS

SEQ ID NO: 3911 - protein, 10 aa, Homo Sapiens
  sequence located in HD OR IT15 at 2665-2674 and may interact with Sequence 3910 in this patent.
RAGVDIHSCS

SEQ ID NO: 3912 - protein, 10 aa, Homo Sapiens
  sequence located in ALAS1 OR ALASH at 278-287 and may interact with Sequence 3913 in this patent.
GGTRNISGTS

SEQ ID NO: 3913 - protein, 10 aa, Homo Sapiens
  sequence located in ALAS1 OR ALASH at 278-287 and may interact with Sequence 3912 in this patent.
GGTRNISGTS

SEQ ID NO: 3914 - protein, 10 aa, Homo Sapiens
  sequence located in HMGCS2 at 266-275 and may interact with Sequence 3915 in this patent.
CEVYRSVDLA

SEQ ID NO: 3915 - protein, 10 aa, Homo Sapiens
  sequence located in HMGCS2 at 266-275 and may interact with Sequence 3914 in this patent.
CEVYRSVDLA

SEQ ID NO: 3916 - protein, 10 aa, Homo Sapiens
  sequence located in HSST1 OR NDST1 OR HSST at 242-251 and may interact with Sequence 3917 in this patent.
LASLRPAEPA

SEQ ID NO: 3917 - protein, 10 aa, Homo Sapiens
  sequence located in HSST1 OR NDST1 OR HSST at 821-830 and may interact with Sequence 3916 in this patent.
EGGKTRCLGR

SEQ ID NO: 3918 - protein, 10 aa, Homo Sapiens
  sequence located in ELAVL4 OR HUD OR PNEM at 108-117 and may interact with Sequence 3919 in this patent.
NGLRLQTKTI

SEQ ID NO: 3919 - protein, 10 aa, Homo Sapiens
  sequence located in ELAVL4 OR HUD OR PNEM at 108-117 and may interact with Sequence 3918 in this patent.
NGLRLQTKTI

SEQ ID NO: 3920 - protein, 10 aa, Homo Sapiens
  sequence located in ELAVL4 OR HUD OR PNEM at 109-118 and may interact with Sequence 3921 in this patent.
GLRLQTKTIK

SEQ ID NO: 3921 - protein, 10 aa, Homo Sapiens
  sequence located in ELAVL4 OR HUD OR PNEM at 107-116 and may interact with Sequence 3920 in this patent.
LNGLRLQTKT

SEQ ID NO: 3922 - protein, 10 aa, Homo Sapiens
  sequence located in Unknown at 85-94 and may interact with Sequence 3923 in this patent.
GRVTSTRDTS

SEQ ID NO: 3923 - protein, 10 aa, Homo Sapiens
  sequence located in Unknown at 85-94 and may interact with Sequence 3922 in this patent.
GRVTSTRDTS

SEQ ID NO: 3924 - protein, 10 aa, Homo Sapiens
  sequence located in HOXA9 OR HOX1G at 101-110 and may interact with Sequence 3925 in this patent.
LSHNNVIVGE

SEQ ID NO: 3925 - protein, 10 aa, Homo Sapiens
  sequence located in HOXA9 OR HOX1G at 101-110 and may interact with Sequence 3924 in this patent.
LSHNNVIVGE

SEQ ID NO: 3926 - protein, 10 aa, Homo Sapiens
  sequence located in HOXA9 OR HOX1G at 177-186 and may interact with Sequence 3927 in this patent.
AASPGSGGGG

SEQ ID NO: 3927 - protein, 10 aa, Homo Sapiens
  sequence located in HOXA9 OR HOX1G at 177-186 and may interact with Sequence 3926 in this patent.
AASPGSGGGG

SEQ ID NO: 3928 - protein, 10 aa, Homo Sapiens
  sequence located in GCK at 377-386 and may interact with Sequence 3929 in this patent.
TRAAHMCSAG

SEQ ID NO: 3929 - protein, 10 aa, Homo Sapiens
  sequence located in GCK at 377-386 and may interact with Sequence 3928 in this patent.
TRAAHMCSAG

SEQ ID NO: 3930 - protein, 10 aa, Homo Sapiens
  sequence located in GCK at 376-385 and may interact with Sequence 3931 in this patent.
TRAAHMCSAG

SEQ ID NO: 3931 - protein, 10 aa, Homo Sapiens
  sequence located in GCK at 376-385 and may interact with Sequence 3930 in this patent.
TRAAHMCSAG

SEQ ID NO: 3932 - protein, 10 aa, Homo Sapiens
  sequence located in IL13RA2 OR IL13R at 53-62 and may interact with Sequence 3933 in this patent.
GAPGGSSRSS

SEQ ID NO: 3933 - protein, 10 aa, Homo Sapiens
  sequence located in IL13RA2 OR IL13R at 53-62 and may interact with Sequence 3932 in this patent.
GAPGGSSRSS

SEQ ID NO: 3934 - protein, 10 aa, Homo Sapiens
  sequence located in IGFBP1 OR IBP1 at 175-184 and may interact with Sequence 3935 in this patent.
GGGSAGRKPL

SEQ ID NO: 3935 - protein, 10 aa, Homo Sapiens
  sequence located in IGFBP1 OR IBP1 at 51-60 and may interact with Sequence 3934 in this patent.
ERLAACGPPP

SEQ ID NO: 3936 - protein, 10 aa, Homo Sapiens
  sequence located in EIF4H OR WBSCR1 OR WSCR1 at 188-197 and may interact with Sequence 3937 in this patent.
RPRLQLKPRT

SEQ ID NO: 3937 - protein, 10 aa, Homo Sapiens
  sequence located in EIF4H OR WBSCR1 OR WSCR1 at 188-197 and may interact with Sequence 3936 in this patent.
RPRLQLKPRT

SEQ ID NO: 3938 - protein, 10 aa, Homo Sapiens
  sequence located in IL5 at 97-106 and may interact with Sequence 3939 in this patent.
YRAGRPAGTV

SEQ ID NO: 3939 - protein, 10 aa, Homo Sapiens
  sequence located in IL5 at 97-106 and may interact with Sequence 3938 in this patent.
YRAGRPAGTV

SEQ ID NO: 3940 - protein, 10 aa, Homo Sapiens
  sequence located in IL7R at 66-75 and may interact with Sequence 3941 in this patent.
TTNLEFEICG

SEQ ID NO: 3941 - protein, 10 aa, Homo Sapiens
  sequence located in IL7R at 66-75 and may interact with Sequence 3940 in this patent.
TTNLEFEICG

SEQ ID NO: 3942 - protein, 10 aa, Homo Sapiens
  sequence located in IL9 at 204-213 and may interact with Sequence 3943 in this patent.
SCPSSPRGAG

SEQ ID NO: 3943 - protein, 10 aa, Homo Sapiens
  sequence located in IL9 at 10-19 and may interact with Sequence 3942 in this patent.
PGTTRARGRG

SEQ ID NO: 3944 - protein, 10 aa, Homo Sapiens
  sequence located in IL9 at 205-214 and may interact with Sequence 3945 in this patent.
CPSSPRGAGS

SEQ ID NO: 3945 - protein, 10 aa, Homo Sapiens
  sequence located in IL9 at 9-18 and may interact with Sequence 3944 in this patent.
GPGTTRARGR

SEQ ID NO: 3946 - protein, 10 aa, Homo Sapiens
  sequence located in IFNA14 at 105-114 and may interact with Sequence 3947 in this patent.
LEKFYIELFQ

SEQ ID NO: 3947 - protein, 10 aa, Homo Sapiens
  sequence located in IFNA14 at 105-114 and may interact with Sequence 3946 in this patent.
LEKFYIELFQ

SEQ ID NO: 3948 - protein, 10 aa, Homo Sapiens
  sequence located in IFNA14 at 106-115 and may interact with Sequence 3949 in this patent.
EKFYIELFQQ

SEQ ID NO: 3949 - protein, 10 aa, Homo Sapiens
  sequence located in IFNA14 at 104-113 and may interact with Sequence 3948 in this patent.
LLEKFYIELF

SEQ ID NO: 3950 - protein, 10 aa, Homo Sapiens
  sequence located in ITPKA at 13-22 and may interact with Sequence 3951 in this patent.
PGGARPCSPG

SEQ ID NO: 3951 - protein, 10 aa, Homo Sapiens
  sequence located in ITPKA at 13-22 and may interact with Sequence 3950 in this patent.
PGGARPCSPG

SEQ ID NO: 3952 - protein, 10 aa, Homo Sapiens
  sequence located in IRF7 at 66-75 and may interact with Sequence 3953 in this patent.
ARGRWPPSSR

SEQ ID NO: 3953 - protein, 10 aa, Homo Sapiens
  sequence located in IRF7 at 66-75 and may interact with Sequence 3952 in this patent.
ARGRWPPSSR

SEQ ID NO: 3954 - protein, 10 aa, Homo Sapiens
  sequence located in IRF7 at 70-79 and may interact with Sequence 3955 in this patent.
WPPSSRGGGP

SEQ ID NO: 3955 - protein, 10 aa, Homo Sapiens
  sequence located in IRF7 at 70-79 and may interact with Sequence 3954 in this patent.
WPPSSRGGGP

SEQ ID NO: 3956 - protein, 10 aa, Homo Sapiens
  sequence located in IRF7 at 71-80 and may interact with Sequence 3957 in this patent.
PPSSRGGGPP

SEQ ID NO: 3957 - protein, 10 aa, Homo Sapiens
  sequence located in IRF7 at 69-78 and may interact with Sequence 3956 in this patent.
RWPPSSRGGG

SEQ ID NO: 3958 - protein, 10 aa, Homo Sapiens
  sequence located in IRF7 at 72-81 and may interact with Sequence 3959 in this patent.
PSSRGGGPPP

SEQ ID NO: 3959 - protein, 10 aa, Homo Sapiens
  sequence located in IRF7 at 68-77 and may interact with Sequence 3958 in this patent.
GRWPPSSRGG

SEQ ID NO: 3960 - protein, 10 aa, Homo Sapiens
  sequence located in IRS1 at 1039-1048 and may interact with Sequence 3961 in this patent.
AASASPTGPQ

SEQ ID NO: 3961 - protein, 10 aa, Homo Sapiens
  sequence located in IRS1 at 127-136 and may interact with Sequence 3960 in this patent.
LGAGGGGGSC

SEQ ID NO: 3962 - protein, 10 aa, Homo Sapiens
  sequence located in IRS1 at 1040-1049 and may interact with Sequence 3963 in this patent.
ASASPTGPQG

SEQ ID NO: 3963 - protein, 10 aa, Homo Sapiens
  sequence located in IRS1 at 126-135 and may interact with Sequence 3962 in this patent.
ALGAGGGGGS

SEQ ID NO: 3964 - protein, 10 aa, Homo Sapiens
  sequence located in IRS1 at 1126-1135 and may interact with Sequence 3965 in this patent.
GGGGGSSSSS

SEQ ID NO: 3965 - protein, 10 aa, Homo Sapiens
  sequence located in IRS1 at 1126-1135 and may interact with Sequence 3964 in this patent.
GGGGGSSSSS

SEQ ID NO: 3966 - protein, 10 aa, Homo Sapiens
  sequence located in IRS1 at 375-384 and may interact with Sequence 3967 in this patent.
IPMPASRCSP

SEQ ID NO: 3967 - protein, 10 aa, Homo Sapiens
  sequence located in IRS1 at 490-499 and may interact with Sequence 3966 in this patent.
NGHRCTPGTG

SEQ ID NO: 3968 - protein, 10 aa, Homo Sapiens
  sequence located in IRS1 at 374-383 and may interact with Sequence 3969 in this patent.
SIPMPASRCS

SEQ ID NO: 3969 - protein, 10 aa, Homo Sapiens
  sequence located in IRS1 at 489-498 and may interact with Sequence 3968 in this patent.
GNGHRCTPGT

SEQ ID NO: 3970 - protein, 10 aa, Homo Sapiens
  sequence located in IRX2 at 306-315 and may interact with Sequence 3971 in this patent.
GGSRASPAPA

SEQ ID NO: 3971 - protein, 10 aa, Homo Sapiens
  sequence located in IRX2 at 306-315 and may interact with Sequence 3970 in this patent.
GGSRASPAPA

SEQ ID NO: 3972 - protein, 10 aa, Homo Sapiens
  sequence located in ITGA5 OR FNRA at 143-152 and may interact with Sequence 3973 in this patent.
GATVRAHGSS

SEQ ID NO: 3973 - protein, 10 aa, Homo Sapiens
  sequence located in ITGA5 OR FNRA at 143-152 and may interact with Sequence 3972 in this patent.
GATVRAHGSS

SEQ ID NO: 3974 - protein, 10 aa, Homo Sapiens
  sequence located in KRT10 at 37-46 and may interact with Sequence 3975 in this patent.
SSSKGSLGGG

SEQ ID NO: 3975 - protein, 10 aa, Homo Sapiens
  sequence located in KRT10 at 37-46 and may interact with Sequence 3974 in this patent.
SSSKGSLGGG

SEQ ID NO: 3976 - protein, 10 aa, Homo Sapiens
  sequence located in KRT10 at 555-564 and may interact with Sequence 3977 in this patent.
SSGGGSSSGG

SEQ ID NO: 3977 - protein, 10 aa, Homo Sapiens
  sequence located in KRT10 at 555-564 and may interact with Sequence 3976 in this patent.
SSGGGSSSGG

SEQ ID NO: 3978 - protein, 10 aa, Homo Sapiens
  sequence located in KRT2E at 221-230 and may interact with Sequence 3979 in this patent.
QTTGSGPSSL

SEQ ID NO: 3979 - protein, 10 aa, Homo Sapiens
  sequence located in KRT2E at 221-230 and may interact with Sequence 3978 in this patent.
QTTGSGPSSL

SEQ ID NO: 3980 - protein, 10 aa, Homo Sapiens
  sequence located in KRT1 OR KRTA at 30-39 and may interact with Sequence 3981 in this patent.
TTSSSTRRSG

SEQ ID NO: 3981 - protein, 10 aa, Homo Sapiens
  sequence located in KRT1 OR KRTA at 30-39 and may interact with Sequence 3980 in this patent.
TTSSSTRRSG

SEQ ID NO: 3982 - protein, 10 aa, Homo Sapiens
  sequence located in KRT1 OR KRTA at 29-38 and may interact with Sequence 3983 in this patent.
RTTSSSTRRS

SEQ ID NO: 3983 - protein, 10 aa, Homo Sapiens
  sequence located in KRT1 OR KRTA at 590-599 and may interact with Sequence 3982 in this patent.
SGGGGGGSSG

SEQ ID NO: 3984 - protein, 10 aa, Homo Sapiens
  sequence located in KRT7 at 457-466 and may interact with Sequence 3985 in this patent.
RTASASRRSA

SEQ ID NO: 3985 - protein, 10 aa, Homo Sapiens
  sequence located in KRT7 at 457-466 and may interact with Sequence 3984 in this patent.
RTASASRRSA

SEQ ID NO: 3986 - protein, 10 aa, Homo Sapiens
  sequence located in KRT6B OR K6B at 528-537 and may interact with Sequence 3987 in this patent.
SSSGRATGGG

SEQ ID NO: 3987 - protein, 10 aa, Homo Sapiens
  sequence located in KRT6B OR K6B at 528-537 and may interact with Sequence 3986 in this patent.
SSSGRATGGG

SEQ ID NO: 3988 - protein, 10 aa, Homo Sapiens
  sequence located in KRT6F at 528-537 and may interact with Sequence 3989 in this patent.
SSSGRATGGG

SEQ ID NO: 3989 - protein, 10 aa, Homo Sapiens
  sequence located in KRT6F at 528-537 and may interact with Sequence 3988 in this patent.
SSSGRATGGG

SEQ ID NO: 3990 - protein, 10 aa, Homo Sapiens
  sequence located in CSNK1D at 339-348 and may interact with Sequence 3991 in this patent.
NRLRSAAEPV

SEQ ID NO: 3991 - protein, 10 aa, Homo Sapiens
  sequence located in CSNK1D at 339-348 and may interact with Sequence 3990 in this patent.
NRLRSAAEPV

SEQ ID NO: 3992 - protein, 10 aa, Homo Sapiens
  sequence located in CSNK2A1 OR CK2A1 at 2-11 and may interact with Sequence 3993 in this patent.
PGPAAGSRAR

SEQ ID NO: 3993 - protein, 10 aa, Homo Sapiens
  sequence located in CSNK2A1 OR CK2A1 at 2-11 and may interact with Sequence 3992 in this patent.
PGPAAGSRAR

SEQ ID NO: 3994 - protein, 10 aa, Homo Sapiens
  sequence located in DAGK4 at 5-14 and may interact with Sequence 3995 in this patent.
AEPGARAWLG

SEQ ID NO: 3995 - protein, 10 aa, Homo Sapiens
  sequence located in DAGK4 at 5-14 and may interact with Sequence 3994 in this patent.
AEPGARAWLG

SEQ ID NO: 3996 - protein, 10 aa, Homo Sapiens
  sequence located in DAGK4 at 6-15 and may interact with Sequence 3997 in this patent.
EPGARAWLGG

SEQ ID NO: 3997 - protein, 10 aa, Homo Sapiens
  sequence located in DAGK4 at 4-13 and may interact with Sequence 3996 in this patent.
AAEPGARAWL

SEQ ID NO: 3998 - protein, 10 aa, Homo Sapiens
  sequence located in DAGK4 at 7-16 and may interact with Sequence 3999 in this patent.
PGARAWLGGG

SEQ ID NO: 3999 - protein, 10 aa, Homo Sapiens
  sequence located in DAGK4 at 3-12 and may interact with Sequence 3998 in this patent.
AAAEPGARAW

SEQ ID NO: 4000 - protein, 10 aa, Homo Sapiens
  sequence located in DAGK4 at 8-17 and may interact with Sequence 4001 in this patent.
GARAWLGGGS

SEQ ID NO: 4001 - protein, 10 aa, Homo Sapiens
  sequence located in DAGK4 at 2-11 and may interact with Sequence 4000 in this patent.
AAAAEPGARA

SEQ ID NO: 4002 - protein, 10 aa, Homo Sapiens
  sequence located in DAGK4 at 34-43 and may interact with Sequence 4003 in this patent.
RARPGPGPGP

SEQ ID NO: 4003 - protein, 10 aa, Homo Sapiens
  sequence located in DAGK4 at 34-43 and may interact with Sequence 4002 in this patent.
RARPGPGPGP

SEQ ID NO: 4004 - protein, 10 aa, Homo Sapiens
  sequence located in DAGK4 at 35-44 and may interact with Sequence 4005 in this patent.
ARPGPGPGPG

SEQ ID NO: 4005 - protein, 10 aa, Homo Sapiens
  sequence located in DAGK4 at 35-44 and may interact with Sequence 4004 in this patent.
ARPGPGPGPG

SEQ ID NO: 4006 - protein, 10 aa, Homo Sapiens
  sequence located in DAGK4 at 276-285 and may interact with Sequence 4007 in this patent.
GADGSAAVGP

SEQ ID NO: 4007 - protein, 10 aa, Homo Sapiens
  sequence located in DAGK4 at 276-285 and may interact with Sequence 4006 in this patent.
GADGSAAVGP

SEQ ID NO: 4008 - protein, 10 aa, Homo Sapiens
  sequence located in DAGK4 at 34-43 and may interact with Sequence 4009 in this patent.
RARPGPGPGP

SEQ ID NO: 4009 - protein, 10 aa, Homo Sapiens
  sequence located in DAGK4 at 35-44 and may interact with Sequence 4008 in this patent.
ARPGPGPGPG

SEQ ID NO: 4010 - protein, 10 aa, Homo Sapiens
  sequence located in MKI67 at 1629-1638 and may interact with Sequence 4011 in this patent.
SKRRLKTSLG

SEQ ID NO: 4011 - protein, 10 aa, Homo Sapiens
  sequence located in MKI67 at 1629-1638 and may interact with Sequence 4010 in this patent.
SKRRLKTSLG

SEQ ID NO: 4012 - protein, 10 aa, Homo Sapiens
  sequence located in MKI67 at 2680-2689 and may interact with Sequence 4013 in this patent.
AGFTELSETS

SEQ ID NO: 4013 - protein, 10 aa, Homo Sapiens
  sequence located in MKI67 at 2680-2689 and may interact with Sequence 4012 in this patent.
AGFTELSETS

SEQ ID NO: 4014 - protein, 10 aa, Homo Sapiens
  sequence located in MYLK OR MLCK at 194-203 and may interact with Sequence 4015 in this patent.
WLKGNVPLQP

SEQ ID NO: 4015 - protein, 10 aa, Homo Sapiens
  sequence located in MYLK OR MLCK at 194-203 and may interact with Sequence 4014 in this patent.
WLKGNVPLQP

SEQ ID NO: 4016 - protein, 10 aa, Homo Sapiens
  sequence located in MYLK OR MLCK at 195-204 and may interact with Sequence 4017 in this patent.
LKGNVPLQPS

SEQ ID NO: 4017 - protein, 10 aa, Homo Sapiens
  sequence located in MYLK OR MLCK at 193-202 and may interact with Sequence 4016 in this patent.
TWLKGNVPLQ

SEQ ID NO: 4018 - protein, 10 aa, Homo Sapiens
  sequence located in MYLK OR MLCK at 1218-1227 and may interact with Sequence 4019 in this patent.
SDATVKKKPA

SEQ ID NO: 4019 - protein, 10 aa, Homo Sapiens
  sequence located in MYLK OR MLCK at 77-86 and may interact with Sequence 4018 in this patent.
GRFLLDCGIR

SEQ ID NO: 4020 - protein, 10 aa, Homo Sapiens
  sequence located in MYLK OR MLCK at 1219-1228 and may interact with Sequence 4021 in this patent.
DATVKKKPAP

SEQ ID NO: 4021 - protein, 10 aa, Homo Sapiens
  sequence located in MYLK OR MLCK at 76-85 and may interact with Sequence 4020 in this patent.
GGRFLLDCGI

SEQ ID NO: 4022 - protein, 10 aa, Homo Sapiens
  sequence located in KLC1 OR KLC OR KNS2 at 45-54 and may interact with Sequence 4023 in this patent.
LLETLKCLKK

SEQ ID NO: 4023 - protein, 10 aa, Homo Sapiens
  sequence located in KLC1 OR KLC OR KNS2 at 45-54 and may interact with Sequence 4022 in this patent.
LLETLKCLKK

SEQ ID NO: 4024 - protein, 10 aa, Homo Sapiens
  sequence located in ARAF1 at 395-404 and may interact with Sequence 4025 in this patent.
TGLSATPPAS

SEQ ID NO: 4025 - protein, 10 aa, Homo Sapiens
  sequence located in ARAF1 at 6-15 and may interact with Sequence 4024 in this patent.
GGGGGGAEPG

SEQ ID NO: 4026 - protein, 10 aa, Homo Sapiens
  sequence located in AKT2 at 1505-1514 and may interact with Sequence 4027 in this patent.
YRILEFQDSI

SEQ ID NO: 4027 - protein, 10 aa, Homo Sapiens
  sequence located in AKT2 at 1505-1514 and may interact with Sequence 4026 in this patent.
YRILEFQDSI

SEQ ID NO: 4028 - protein, 10 aa, Homo Sapiens
  sequence located in LAF4 at 436-445 and may interact with Sequence 4029 in this patent.
QRSGRAPGAL

SEQ ID NO: 4029 - protein, 10 aa, Homo Sapiens
  sequence located in LAF4 at 436-445 and may interact with Sequence 4028 in this patent.
QRSGRAPGAL

SEQ ID NO: 4030 - protein, 10 aa, Homo Sapiens
  sequence located in LGALS7 at 93-102 and may interact with Sequence 4031 in this patent.
SDDGFKAVVG

SEQ ID NO: 4031 - protein, 10 aa, Homo Sapiens
  sequence located in LGALS7 at 93-102 and may interact with Sequence 4030 in this patent.
SDDGFKAVVG

SEQ ID NO: 4032 - protein, 10 aa, Homo Sapiens
  sequence located in LIPA at 274-283 and may interact with Sequence 4033 in this patent.
MSRVDVYTTH

SEQ ID NO: 4033 - protein, 10 aa, Homo Sapiens
  sequence located in LIPA at 274-283 and may interact with Sequence 4032 in this patent.
MSRVDVYTTH

SEQ ID NO: 4034 - protein, 10 aa, Homo Sapiens
  sequence located in LAMB2 at 1651-1660 and may interact with Sequence 4035 in this patent.
RALSSAGERA

SEQ ID NO: 4035 - protein, 10 aa, Homo Sapiens
  sequence located in LAMB2 at 1651-1660 and may interact with Sequence 4034 in this patent.
RALSSAGERA

SEQ ID NO: 4036 - protein, 10 aa, Homo Sapiens
  sequence located in LAMC2 at 144-153 and may interact with Sequence 4037 in this patent.
AGIAGPCDAG

SEQ ID NO: 4037 - protein, 10 aa, Homo Sapiens
  sequence located in LAMC2 at 144-153 and may interact with Sequence 4036 in this patent.
AGIAGPCDAG

SEQ ID NO: 4038 - protein, 10 aa, Homo Sapiens
  sequence located in LAMC2 at 145-154 and may interact with Sequence 4039 in this patent.
GIAGPCDAGR

SEQ ID NO: 4039 - protein, 10 aa, Homo Sapiens
  sequence located in LAMC2 at 143-152 and may interact with Sequence 4038 in this patent.
PAGIAGPCDA

SEQ ID NO: 4040 - protein, 10 aa, Homo Sapiens
  sequence located in Unknown at 66-75 and may interact with Sequence 4041 in this patent.
SKSGTSATLG

SEQ ID NO: 4041 - protein, 10 aa, Homo Sapiens
  sequence located in Unknown at 66-75 and may interact with Sequence 4040 in this patent.
SKSGTSATLG

SEQ ID NO: 4042 - protein, 10 aa, Homo Sapiens
  sequence located in SAPK2 at 28-37 and may interact with Sequence 4043 in this patent.
RPVGSGAYGS

SEQ ID NO: 4043 - protein, 10 aa, Homo Sapiens
  sequence located in SAPK2 at 28-37 and may interact with Sequence 4042 in this patent.
RPVGSGAYGS

SEQ ID NO: 4044 - protein, 10 aa, Homo Sapiens
  sequence located in SAPK2 at 32-41 and may interact with Sequence 4045 in this patent.
SGAYGSVCSA

SEQ ID NO: 4045 - protein, 10 aa, Homo Sapiens
  sequence located in SAPK2 at 32-41 and may interact with Sequence 4044 in this patent.
SGAYGSVCSA

SEQ ID NO: 4046 - protein, 10 aa, Homo Sapiens
  sequence located in GPM6A OR M6A at 15-24 and may interact with Sequence 4047 in this patent.
TGSARPRGAR

SEQ ID NO: 4047 - protein, 10 aa, Homo Sapiens
  sequence located in GPM6A OR M6A at 15-24 and may interact with Sequence 4046 in this patent.
TGSARPRGAR

SEQ ID NO: 4048 - protein, 10 aa, Homo Sapiens
  sequence located in GPM6A OR M6A at 19-28 and may interact with Sequence 4049 in this patent.
RPRGARTPRS

SEQ ID NO: 4049 - protein, 10 aa, Homo Sapiens
  sequence located in GPM6A OR M6A at 19-28 and may interact with Sequence 4048 in this patent.
RPRGARTPRS

SEQ ID NO: 4050 - protein, 10 aa, Homo Sapiens
  sequence located in GPM6A OR M6A at 15-24 and may interact with Sequence 4051 in this patent.
TGSARPRGAR

SEQ ID NO: 4051 - protein, 10 aa, Homo Sapiens
  sequence located in GPM6A OR M6A at 19-28 and may interact with Sequence 4050 in this patent.
RPRGARTPRS

SEQ ID NO: 4052 - protein, 10 aa, Homo Sapiens
  sequence located in MLR OR NR3C2 OR MCR at 344-353 and may interact with Sequence 4053 in this patent.
TASGTSAGSS

SEQ ID NO: 4053 - protein, 10 aa, Homo Sapiens
  sequence located in MLR OR NR3C2 OR MCR at 344-353 and may interact with Sequence 4052 in this patent.
TASGTSAGSS

SEQ ID NO: 4054 - protein, 10 aa, Homo Sapiens
  sequence located in MEF2D at 223-232 and may interact with Sequence 4055 in this patent.
TRSGGTPGPS

SEQ ID NO: 4055 - protein, 10 aa, Homo Sapiens
  sequence located in MEF2D at 223-232 and may interact with Sequence 4054 in this patent.
TRSGGTPGPS

SEQ ID NO: 4056 - protein, 10 aa, Homo Sapiens
  sequence located in MAGE-B2 at 46-55 and may interact with Sequence 4057 in this patent.
SGGAASSSPA

SEQ ID NO: 4057 - protein, 10 aa, Homo Sapiens
  sequence located in MAGE-B2 at 46-55 and may interact with Sequence 4056 in this patent.
SGGAASSSPA

SEQ ID NO: 4058 - protein, 10 aa, Homo Sapiens
  sequence located in GRM5 OR MGLUR5 at 964-973 and may interact with Sequence 4059 in this patent.
GAGAGGSAGG

SEQ ID NO: 4059 - protein, 10 aa, Homo Sapiens
  sequence located in GRM5 OR MGLUR5 at 852-861 and may interact with Sequence 4058 in this patent.
SSSAASRSSS

SEQ ID NO: 4060 - protein, 10 aa, Homo Sapiens
  sequence located in MKLP1 at 209-218 and may interact with Sequence 4061 in this patent.
DEDSVYGVFV

SEQ ID NO: 4061 - protein, 10 aa, Homo Sapiens
  sequence located in MKLP1 at 209-218 and may interact with Sequence 4060 in this patent.
DEDSVYGVFV

SEQ ID NO: 4062 - protein, 10 aa, Homo Sapiens
  sequence located in MUC2 OR SMUC at 4284-4293 and may interact with Sequence 4063 in this patent.
RGTTTGSSSA

SEQ ID NO: 4063 - protein, 10 aa, Homo Sapiens
  sequence located in MUC2 OR SMUC at 4284-4293 and may interact with Sequence 4062 in this patent.
RGTTTGSSSA

SEQ ID NO: 4064 - protein, 10 aa, Homo Sapiens
  sequence located in MUC2 OR SMUC at 5162-5171 and may interact with Sequence 4065 in this patent.
PTGTSRRARR

SEQ ID NO: 4065 - protein, 10 aa, Homo Sapiens
  sequence located in MUC2 OR SMUC at 5162-5171 and may interact with Sequence 4064 in this patent.
PTGTSRRARR

SEQ ID NO: 4066 - protein, 10 aa, Homo Sapiens
  sequence located in MUC5AC OR MUC5 at 1007-1016 and may interact with Sequence 4067 in this patent.
PATPSTRRRR

SEQ ID NO: 4067 - protein, 10 aa, Homo Sapiens
  sequence located in MUC5AC OR MUC5 at 1007-1016 and may interact with Sequence 4066 in this patent.
PATPSTRRRR

SEQ ID NO: 4068 - protein, 10 aa, Homo Sapiens
  sequence located in MYOC OR TIGR at 86-95 and may interact with Sequence 4069 in this patent.
EATKARLSSL

SEQ ID NO: 4069 - protein, 10 aa, Homo Sapiens
  sequence located in MYOC OR TIGR at 86-95 and may interact with Sequence 4068 in this patent.
EATKARLSSL

SEQ ID NO: 4070 - protein, 10 aa, Homo Sapiens
  sequence located in MYOC OR TIGR at 87-96 and may interact with Sequence 4071 in this patent.
ATKARLSSLE

SEQ ID NO: 4071 - protein, 10 aa, Homo Sapiens
  sequence located in MYOC OR TIGR at 85-94 and may interact with Sequence 4070 in this patent.
LEATKARLSS

SEQ ID NO: 4072 - protein, 10 aa, Homo Sapiens
  sequence located in MYOC OR TIGR at 166-175 and may interact with Sequence 4073 in this patent.
LARRLESSSQ

SEQ ID NO: 4073 - protein, 10 aa, Homo Sapiens
  sequence located in MYOC OR TIGR at 166-175 and may interact with Sequence 4072 in this patent.
LARRLESSSQ

SEQ ID NO: 4074 - protein, 10 aa, Homo Sapiens
  sequence located in MYH6 OR MYHCA at 742-751 and may interact with Sequence 4075 in this patent.
KGTEKLLSSL

SEQ ID NO: 4075 - protein, 10 aa, Homo Sapiens
  sequence located in MYH6 OR MYHCA at 742-751 and may interact with Sequence 4074 in this patent.
KGTEKLLSSL

SEQ ID NO: 4076 - protein, 10 aa, Homo Sapiens
  sequence located in MYH10 at 6-15 and may interact with Sequence 4077 in this patent.
GGVGGGGGGK

SEQ ID NO: 4077 - protein, 10 aa, Homo Sapiens
  sequence located in MYH10 at 894-903 and may interact with Sequence 4076 in this patent.
SSNSAASSSF

SEQ ID NO: 4078 - protein, 10 aa, Homo Sapiens
  sequence located in MYH10 at 5-14 and may interact with Sequence 4079 in this patent.
AGGVGGGGGG

SEQ ID NO: 4079 - protein, 10 aa, Homo Sapiens
  sequence located in MYH10 at 893-902 and may interact with Sequence 4078 in this patent.
SSSNSAASSS

SEQ ID NO: 4080 - protein, 10 aa, Homo Sapiens
  sequence located in MYH10 at 4-13 and may interact with Sequence 4081 in this patent.
GAGGVGGGGG

SEQ ID NO: 4081 - protein, 10 aa, Homo Sapiens
  sequence located in MYH10 at 892-901 and may interact with Sequence 4080 in this patent.
SSSSNSAASS

SEQ ID NO: 4082 - protein, 10 aa, Homo Sapiens
  sequence located in SLC8A1 OR NCX1 OR CNC at 933-942 and may interact with Sequence 4083 in this patent.
ELGGPRTAKL

SEQ ID NO: 4083 - protein, 10 aa, Homo Sapiens
  sequence located in SLC8A1 OR NCX1 OR CNC at 933-942 and may interact with Sequence 4082 in this patent.
ELGGPRTAKL

SEQ ID NO: 4084 - protein, 10 aa, Homo Sapiens
  sequence located in PCSK1 OR NEC1 at 322-331 and may interact with Sequence 4085 in this patent.
YTDSIYTISI

SEQ ID NO: 4085 - protein, 10 aa, Homo Sapiens
  sequence located in PCSK1 OR NEC1 at 322-331 and may interact with Sequence 4084 in this patent.
YTDSIYTISI

SEQ ID NO: 4086 - protein, 10 aa, Homo Sapiens
  sequence located in PCSK1 OR NEC1 at 323-332 and may interact with Sequence 4087 in this patent.
TDSIYTISIS

SEQ ID NO: 4087 - protein, 10 aa, Homo Sapiens
  sequence located in PCSK1 OR NEC1 at 321-330 and may interact with Sequence 4086 in this patent.
GYTDSIYTIS

SEQ ID NO: 4088 - protein, 10 aa, Homo Sapiens
  sequence located in SLC12A2 OR NKCC1 at 584-593 and may interact with Sequence 4089 in this patent.
RGSSRSRTAS

SEQ ID NO: 4089 - protein, 10 aa, Homo Sapiens
  sequence located in SLC12A2 OR NKCC1 at 584-593 and may interact with Sequence 4088 in this patent.
RGSSRSRTAS

SEQ ID NO: 4090 - protein, 10 aa, Homo Sapiens
  sequence located in Unknown at 373-382 and may interact with Sequence 4091 in this patent.
SASGSTAGGT

SEQ ID NO: 4091 - protein, 10 aa, Homo Sapiens
  sequence located in Unknown at 373-382 and may interact with Sequence 4090 in this patent.
SASGSTAGGT

SEQ ID NO: 4092 - protein, 10 aa, Homo Sapiens
  sequence located in Unknown at 375-384 and may interact with Sequence 4093 in this patent.
SGSTAGGTAG

SEQ ID NO: 4093 - protein, 10 aa, Homo Sapiens
  sequence located in Unknown at 375-384 and may interact with Sequence 4092 in this patent.
SGSTAGGTAG

SEQ ID NO: 4094 - protein, 10 aa, Homo Sapiens
  sequence located in NRTN at 75-84 and may interact with Sequence 4095 in this patent.
PWAGRPPGPR

SEQ ID NO: 4095 - protein, 10 aa, Homo Sapiens
  sequence located in NRTN at 75-84 and may interact with Sequence 4094 in this patent.
PWAGRPPGPR

SEQ ID NO: 4096 - protein, 10 aa, Homo Sapiens
  sequence located in NRTN at 76-85 and may interact with Sequence 4097 in this patent.
WAGRPPGPRR

SEQ ID NO: 4097 - protein, 10 aa, Homo Sapiens
  sequence located in NRTN at 74-83 and may interact with Sequence 4096 in this patent.
TPWAGRPPGP

SEQ ID NO: 4098 - protein, 10 aa, Homo Sapiens
  sequence located in NRTN at 160-169 and may interact with Sequence 4099 in this patent.
RAQPCCRPTA

SEQ ID NO: 4099 - protein, 10 aa, Homo Sapiens
  sequence located in NRTN at 91-100 and may interact with Sequence 4098 in this patent.
RRRARARLGA

SEQ ID NO: 4100 - protein, 10 aa, Homo Sapiens
  sequence located in NTAK at 79-88 and may interact with Sequence 4101 in this patent.
RRAAARSRAA

SEQ ID NO: 4101 - protein, 10 aa, Homo Sapiens
  sequence located in NTAK at 79-88 and may interact with Sequence 4100 in this patent.
RRAAARSRAA

SEQ ID NO: 4102 - protein, 10 aa, Homo Sapiens
  sequence located in NOTCH1 OR TAN1 at 1675-1684 and may interact with Sequence 4103 in this patent.
SIVYLEIDNR

SEQ ID NO: 4103 - protein, 10 aa, Homo Sapiens
  sequence located in NOTCH1 OR TAN1 at 1675-1684 and may interact with Sequence 4102 in this patent.
SIVYLEIDNR

SEQ ID NO: 4104 - protein, 10 aa, Homo Sapiens
  sequence located in POU3F1 OR OTF6 OR OCT6 at 417-426 and may interact with Sequence 4105 in this patent.
GGGGASPPSA

SEQ ID NO: 4105 - protein, 10 aa, Homo Sapiens
  sequence located in POU3F1 OR OTF6 OR OCT6 at 417-426 and may interact with Sequence 4104 in this patent.
GGGGASPPSA

SEQ ID NO: 4106 - protein, 10 aa, Homo Sapiens
  sequence located in ORC1L OR ORC1 OR PARC1 at 255-264 and may interact with Sequence 4107 in this patent.
SLDSPGRIKR

SEQ ID NO: 4107 - protein, 10 aa, Homo Sapiens
  sequence located in ORC1L OR ORC1 OR PARC1 at 255-264 and may interact with Sequence 4106 in this patent.
SLDSPGRIKR

SEQ ID NO: 4108 - protein, 10 aa, Homo Sapiens
  sequence located in HCRT OR OX OR PPOX at 98-107 and may interact with Sequence 4109 in this patent.
GRRAGAEPAP

SEQ ID NO: 4109 - protein, 10 aa, Homo Sapiens
  sequence located in HCRT OR OX OR PPOX at 105-114 and may interact with Sequence 4108 in this patent.
PAPRPCLGRR

SEQ ID NO: 4110 - protein, 10 aa, Homo Sapiens
  sequence located in OSBP at 40-49 and may interact with Sequence 4111 in this patent.
GPGSGAASGT

SEQ ID NO: 4111 - protein, 10 aa, Homo Sapiens
  sequence located in OSBP at 40-49 and may interact with Sequence 4110 in this patent.
GPGSGAASGT

SEQ ID NO: 4112 - protein, 10 aa, Homo Sapiens
  sequence located in OSBP at 54-63 and may interact with Sequence 4113 in this patent.
AAGGPGPGAG

SEQ ID NO: 4113 - protein, 10 aa, Homo Sapiens
  sequence located in OSBP at 39-48 and may interact with Sequence 4112 in this patent.
AGPGSGAASG

SEQ ID NO: 4114 - protein, 10 aa, Homo Sapiens
  sequence located in OSBP at 618-627 and may interact with Sequence 4115 in this patent.
YFSRDVARKV

SEQ ID NO: 4115 - protein, 10 aa, Homo Sapiens
  sequence located in OSBP at 618-627 and may interact with Sequence 4114 in this patent.
YFSRDVARKV

SEQ ID NO: 4116 - protein, 10 aa, Homo Sapiens
  sequence located in OSBP at 619-628 and may interact with Sequence 4117 in this patent.
FSRDVARKVT

SEQ ID NO: 4117 - protein, 10 aa, Homo Sapiens
  sequence located in OSBP at 617-626 and may interact with Sequence 4116 in this patent.
SYFSRDVARK

SEQ ID NO: 4118 - protein, 10 aa, Homo Sapiens
  sequence located in PBX3 at 134-143 and may interact with Sequence 4119 in this patent.
AAAAASGGSS

SEQ ID NO: 4119 - protein, 10 aa, Homo Sapiens
  sequence located in PBX3 at 134-143 and may interact with Sequence 4118 in this patent.
AAAAASGGSS

SEQ ID NO: 4120 - protein, 10 aa, Homo Sapiens
  sequence located in PLCG1 OR PLC1 at 374-383 and may interact with Sequence 4121 in this patent.
GMPVIYHGHT

SEQ ID NO: 4121 - protein, 10 aa, Homo Sapiens
  sequence located in PLCG1 OR PLC1 at 374-383 and may interact with Sequence 4120 in this patent.
GMPVIYHGHT

SEQ ID NO: 4122 - protein, 10 aa, Homo Sapiens
  sequence located in PKD1 at 4253-4262 and may interact with Sequence 4123 in this patent.
RAPAGSSRGP

SEQ ID NO: 4123 - protein, 10 aa, Homo Sapiens
  sequence located in PKD1 at 4253-4262 and may interact with Sequence 4122 in this patent.
RAPAGSSRGP

SEQ ID NO: 4124 - protein, 10 aa, Homo Sapiens
  sequence located in PKD1 at 920-929 and may interact with Sequence 4125 in this patent.
ANLSLRVTAE

SEQ ID NO: 4125 - protein, 10 aa, Homo Sapiens
  sequence located in PKD1 at 3220-3229 and may interact with Sequence 4124 in this patent.
SVETEANGGL

SEQ ID NO: 4126 - protein, 10 aa, Homo Sapiens
  sequence located in PMP22 OR GAS3 at 155-164 and may interact with Sequence 4127 in this patent.
ESLKDVLERL

SEQ ID NO: 4127 - protein, 10 aa, Homo Sapiens
  sequence located in PMP22 OR GAS3 at 155-164 and may interact with Sequence 4126 in this patent.
ESLKDVLERL

SEQ ID NO: 4128 - protein, 10 aa, Homo Sapiens
  sequence located in PMX2 OR PRX2 at 127-136 and may interact with Sequence 4129 in this patent.
PGSSGPATPG

SEQ ID NO: 4129 - protein, 10 aa, Homo Sapiens
  sequence located in PMX2 OR PRX2 at 127-136 and may interact with Sequence 4128 in this patent.
PGSSGPATPG

SEQ ID NO: 4130 - protein, 10 aa, Homo Sapiens
  sequence located in PNOC OR OFQ at 131-140 and may interact with Sequence 4131 in this patent.
GGFTGARKSA

SEQ ID NO: 4131 - protein, 10 aa, Homo Sapiens
  sequence located in PNOC OR OFQ at 131-140 and may interact with Sequence 4130 in this patent.
GGFTGARKSA

SEQ ID NO: 4132 - protein, 10 aa, Homo Sapiens
  sequence located in PKNOX1 at 126-135 and may interact with Sequence 4133 in this patent.
IHLLELEKVN

SEQ ID NO: 4133 - protein, 10 aa, Homo Sapiens
  sequence located in PKNOX1 at 126-135 and may interact with Sequence 4132 in this patent.
IHLLELEKVN

SEQ ID NO: 4134 - protein, 10 aa, Homo Sapiens
  sequence located in PCK1 OR PEPCK1 at 97-106 and may interact with Sequence 4135 in this patent.
QRVLYVQDSL

SEQ ID NO: 4135 - protein, 10 aa, Homo Sapiens
  sequence located in PCK1 OR PEPCK1 at 97-106 and may interact with Sequence 4134 in this patent.
QRVLYVQDSL

SEQ ID NO: 4136 - protein, 10 aa, Homo Sapiens
  sequence located in PCK2 OR PEPCK2 at 235-244 and may interact with Sequence 4137 in this patent.
TLIGHVPDQR

SEQ ID NO: 4137 - protein, 10 aa, Homo Sapiens
  sequence located in PCK2 OR PEPCK2 at 235-244 and may interact with Sequence 4136 in this patent.
TLIGHVPDQR

SEQ ID NO: 4138 - protein, 10 aa, Homo Sapiens
  sequence located in PROZ at 244-253 and may interact with Sequence 4139 in this patent.
ITHVHVHMRY

SEQ ID NO: 4139 - protein, 10 aa, Homo Sapiens
  sequence located in PROZ at 244-253 and may interact with Sequence 4138 in this patent.
ITHVHVHMRY

SEQ ID NO: 4140 - protein, 10 aa, Homo Sapiens
  sequence located in TMPO at 79-88 and may interact with Sequence 4141 in this patent.
GAAAAGRSRA

SEQ ID NO: 4141 - protein, 10 aa, Homo Sapiens
  sequence located in TMPO at 79-88 and may interact with Sequence 4140 in this patent.
GAAAAGRSRA

SEQ ID NO: 4142 - protein, 10 aa, Homo Sapiens
  sequence located in TMPO at 80-89 and may interact with Sequence 4143 in this patent.
AAAAGRSRAA

SEQ ID NO: 4143 - protein, 10 aa, Homo Sapiens
  sequence located in TMPO at 78-87 and may interact with Sequence 4142 in this patent.
SGAAAAGRSR

SEQ ID NO: 4144 - protein, 10 aa, Homo Sapiens
  sequence located in TNFSF9 at 56-65 and may interact with Sequence 4145 in this patent.
SGARASPGSA

SEQ ID NO: 4145 - protein, 10 aa, Homo Sapiens
  sequence located in TNFSF9 at 56-65 and may interact with Sequence 4144 in this patent.
SGARASPGSA

SEQ ID NO: 4146 - protein, 10 aa, Homo Sapiens
  sequence located in TNFAIP2 at 379-388 and may interact with Sequence 4147 in this patent.
TLDLGSQIKR

SEQ ID NO: 4147 - protein, 10 aa, Homo Sapiens
  sequence located in TNFAIP2 at 379-388 and may interact with Sequence 4146 in this patent.
TLDLGSQIKR

SEQ ID NO: 4148 - protein, 10 aa, Homo Sapiens
  sequence located in TPP2 at 1656-1665 and may interact with Sequence 4149 in this patent.
RGIASTSDPP

SEQ ID NO: 4149 - protein, 10 aa, Homo Sapiens
  sequence located in TPP2 at 1656-1665 and may interact with Sequence 4148 in this patent.
RGIASTSDPP

SEQ ID NO: 4150 - protein, 10 aa, Homo Sapiens
  sequence located in TNNI3 OR TNNC1 at 156-165 and may interact with Sequence 4151 in this patent.
ALLGARAKES

SEQ ID NO: 4151 - protein, 10 aa, Homo Sapiens
  sequence located in TNNI3 OR TNNC1 at 156-165 and may interact with Sequence 4150 in this patent.
ALLGARAKES

SEQ ID NO: 4152 - protein, 10 aa, Homo Sapiens
  sequence located in TNNI3 OR TNNC1 at 157-166 and may interact with Sequence 4153 in this patent.
LLGARAKESL

SEQ ID NO: 4153 - protein, 10 aa, Homo Sapiens
  sequence located in TNNI3 OR TNNC1 at 155-164 and may interact with Sequence 4152 in this patent.
QALLGARAKE

SEQ ID NO: 4154 - protein, 10 aa, Homo Sapiens
  sequence located in THBS2 OR TSP2 at 992-1001 and may interact with Sequence 4155 in this patent.
ANSDPGIAVG

SEQ ID NO: 4155 - protein, 10 aa, Homo Sapiens
  sequence located in THBS2 OR TSP2 at 992-1001 and may interact with Sequence 4154 in this patent.
ANSDPGIAVG

SEQ ID NO: 4156 - protein, 10 aa, Homo Sapiens
  sequence located in THBS3 OR TSP3 at 384-393 and may interact with Sequence 4157 in this patent.
PNSICTNTVG

SEQ ID NO: 4157 - protein, 10 aa, Homo Sapiens
  sequence located in THBS3 OR TSP3 at 384-393 and may interact with Sequence 4156 in this patent.
PNSICTNTVG

SEQ ID NO: 4158 - protein, 10 aa, Homo Sapiens
  sequence located in YY1 at 159-168 and may interact with Sequence 4159 in this patent.
SGGGGSSSSG

SEQ ID NO: 4159 - protein, 10 aa, Homo Sapiens
  sequence located in YY1 at 159-168 and may interact with Sequence 4158 in this patent.
SGGGGSSSSG

SEQ ID NO: 4160 - protein, 10 aa, Homo Sapiens
  sequence located in UBE1 at 739-748 and may interact with Sequence 4161 in this patent.
APFWSGPKRC

SEQ ID NO: 4161 - protein, 10 aa, Homo Sapiens
  sequence located in UBE1 at 739-748 and may interact with Sequence 4160 in this patent.
APFWSGPKRC

SEQ ID NO: 4162 - protein, 10 aa, Homo Sapiens
  sequence located in UBE1 at 740-749 and may interact with Sequence 4163 in this patent.
PFWSGPKRCP

SEQ ID NO: 4163 - protein, 10 aa, Homo Sapiens
  sequence located in UBE1 at 738-747 and may interact with Sequence 4162 in this patent.
GAPFWSGPKR

SEQ ID NO: 4164 - protein, 10 aa, Homo Sapiens
  sequence located in Unknown at 740-749 and may interact with Sequence 4165 in this patent.
GARAGGTSSP

SEQ ID NO: 4165 - protein, 10 aa, Homo Sapiens
  sequence located in Unknown at 529-538 and may interact with Sequence 4164 in this patent.
RGGRSPRPGS

SEQ ID NO: 4166 - protein, 10 aa, Homo Sapiens
  sequence located in Unknown at 741-750 and may interact with Sequence 4167 in this patent.
ARAGGTSSPS

SEQ ID NO: 4167 - protein, 10 aa, Homo Sapiens
  sequence located in Unknown at 741-750 and may interact with Sequence 4166 in this patent.
ARAGGTSSPS

SEQ ID NO: 4168 - protein, 10 aa, Homo Sapiens
  sequence located in Unknown at 742-751 and may interact with Sequence 4169 in this patent.
RAGGTSSPSP

SEQ ID NO: 4169 - protein, 10 aa, Homo Sapiens
  sequence located in Unknown at 742-751 and may interact with Sequence 4168 in this patent.
RAGGTSSPSP

SEQ ID NO: 4170 - protein, 10 aa, Homo Sapiens
  sequence located in Unknown at 742-751 and may interact with Sequence 4171 in this patent.
RAGGTSSPSP

SEQ ID NO: 4171 - protein, 10 aa, Homo Sapiens
  sequence located in Unknown at 740-749 and may interact with Sequence 4170 in this patent.
GARAGGTSSP

SEQ ID NO: 4172 - protein, 10 aa, Homo Sapiens
  sequence located in Unknown at 410-419 and may interact with Sequence 4173 in this patent.
SSPSPSGRAG

SEQ ID NO: 4173 - protein, 10 aa, Homo Sapiens
  sequence located in Unknown at 740-749 and may interact with Sequence 4172 in this patent.
GARAGGTSSP

SEQ ID NO: 4174 - protein, 10 aa, Homo Sapiens
  sequence located in LCN1 OR VEGP at 1169-1178 and may interact with Sequence 4175 in this patent.
DGKDYIVLPI

SEQ ID NO: 4175 - protein, 10 aa, Homo Sapiens
  sequence located in LCN1 OR VEGP at 1169-1178 and may interact with Sequence 4174 in this patent.
DGKDYIVLPI

SEQ ID NO: 4176 - protein, 10 aa, Homo Sapiens
  sequence located in F8VWF OR VWF at 18-27 and may interact with Sequence 4177 in this patent.
PGTLCAEGTR

SEQ ID NO: 4177 - protein, 10 aa, Homo Sapiens
  sequence located in F8VWF OR VWF at 18-27 and may interact with Sequence 4176 in this patent.
PGTLCAEGTR

SEQ ID NO: 4178 - protein, 10 aa, Homo Sapiens
  sequence located in F8VWF OR VWF at 629-638 and may interact with Sequence 4179 in this patent.
YAAACAGRGV

SEQ ID NO: 4179 - protein, 10 aa, Homo Sapiens
  sequence located in F8VWF OR VWF at 629-638 and may interact with Sequence 4178 in this patent.
YAAACAGRGV

SEQ ID NO: 4180 - protein, 10 aa, Homo Sapiens
  sequence located in F8VWF OR VWF at 630-639 and may interact with Sequence 4181 in this patent.
AAACAGRGVR

SEQ ID NO: 4181 - protein, 10 aa, Homo Sapiens
  sequence located in F8VWF OR VWF at 628-637 and may interact with Sequence 4180 in this patent.
SYAAACAGRG

SEQ ID NO: 4182 - protein, 10 aa, Homo Sapiens
  sequence located in F8VWF OR VWF at 1536-1545 and may interact with Sequence 4183 in this patent.
HVTVLQYSYM

SEQ ID NO: 4183 - protein, 10 aa, Homo Sapiens
  sequence located in F8VWF OR VWF at 1536-1545 and may interact with Sequence 4182 in this patent.
HVTVLQYSYM

SEQ ID NO: 4184 - protein, 10 aa, Homo Sapiens
  sequence located in F8VWF OR VWF at 2340-2349 and may interact with Sequence 4185 in this patent.
CERGLQPTLT

SEQ ID NO: 4185 - protein, 10 aa, Homo Sapiens
  sequence located in F8VWF OR VWF at 2340-2349 and may interact with Sequence 4184 in this patent.
CERGLQPTLT

SEQ ID NO: 4186 - protein, 10 aa, Homo Sapiens
  sequence located in SLC16A2 OR XPCT at 35-44 and may interact with Sequence 4187 in this patent.
GGGSGSGSSS

SEQ ID NO: 4187 - protein, 10 aa, Homo Sapiens
  sequence located in SLC16A2 OR XPCT at 35-44 and may interact with Sequence 4186 in this patent.
GGGSGSGSSS

SEQ ID NO: 4188 - protein, 10 aa, Homo Sapiens
  sequence located in SLC16A2 OR XPCT at 36-45 and may interact with Sequence 4189 in this patent.
GGSGSGSSSP

SEQ ID NO: 4189 - protein, 10 aa, Homo Sapiens
  sequence located in SLC16A2 OR XPCT at 34-43 and may interact with Sequence 4188 in this patent.
GGGGSGSGSS

SEQ ID NO: 4190 - protein, 10 aa, Homo Sapiens
  sequence located in KIAA0054 at 740-749 and may interact with Sequence 4191 in this patent.
RLDYSRIIQS

SEQ ID NO: 4191 - protein, 10 aa, Homo Sapiens
  sequence located in KIAA0054 at 740-749 and may interact with Sequence 4190 in this patent.
RLDYSRIIQS

SEQ ID NO: 4192 - protein, 10 aa, Homo Sapiens
  sequence located in KIAA0054 at 741-750 and may interact with Sequence 4193 in this patent.
LDYSRIIQSW

SEQ ID NO: 4193 - protein, 10 aa, Homo Sapiens
  sequence located in KIAA0054 at 739-748 and may interact with Sequence 4192 in this patent.
PRLDYSRIIQ

SEQ ID NO: 4194 - protein, 10 aa, Homo Sapiens
  sequence located in KIAA0174 at 336-345 and may interact with Sequence 4195 in this patent.
ASAGASTSAS

SEQ ID NO: 4195 - protein, 10 aa, Homo Sapiens
  sequence located in KIAA0174 at 336-345 and may interact with Sequence 4194 in this patent.
ASAGASTSAS

SEQ ID NO: 4196 - protein, 10 aa, Homo Sapiens
  sequence located in KIAA0514 at 135-144 and may interact with Sequence 4197 in this patent.
GARKASLSCS

SEQ ID NO: 4197 - protein, 10 aa, Homo Sapiens
  sequence located in KIAA0514 at 135-144 and may interact with Sequence 4196 in this patent.
GARKASLSCS

SEQ ID NO: 4198 - protein, 10 aa, Homo Sapiens
  sequence located in KIAA0514 at 136-145 and may interact with Sequence 4199 in this patent.
ARKASLSCSA

SEQ ID NO: 4199 - protein, 10 aa, Homo Sapiens
  sequence located in KIAA0514 at 134-143 and may interact with Sequence 4198 in this patent.
SGARKASLSC

SEQ ID NO: 4200 - protein, 10 aa, Homo Sapiens
  sequence located in AZGP1 OR ZAG at 798-807 and may interact with Sequence 4201 in this patent.
VGRRTSSSSD

SEQ ID NO: 4201 - protein, 10 aa, Homo Sapiens
  sequence located in AZGP1 OR ZAG at 798-807 and may interact with Sequence 4200 in this patent.
VGRRTSSSSD

SEQ ID NO: 4202 - protein, 10 aa, Homo Sapiens
  sequence located in Unknown at 44-53 and may interact with Sequence 4203 in this patent.
VVDSDITVHN

SEQ ID NO: 4203 - protein, 10 aa, Homo Sapiens
  sequence located in Unknown at 44-53 and may interact with Sequence 4202 in this patent.
VVDSDITVHN
